(19) United States
(12) Patent Application Publication
(10) Pub. No.: US 2024/0409598 A1
(43) Pub. Date: Dec. 12, 2024

(54) PEPTIDE INHIBITORS OF INTERLEUKIN-23 RECEPTOR

(71) Applicants: Janssen Biotech, Inc., Horsham, PA (US); Protagonist Therapeutics, Inc., Newark, CA (US)

(72) Inventors: Stephanie A. Barros, Chalfont, PA (US); Charles Hendrick, North Wales, PA (US); Santhosh Neelamkavil, Edison, NJ (US); Raymond J. Patch, Yardley, PA (US); Sandeep Somani, Princeton, NJ (US); Chengzao Sun, Warrington, PA (US); Jing Zhang, Wilmington, DE (US); Elisabetta Bianchi, Pomezia (Rome) (IT); Danila Branca, Pomezia (Rome) (IT); Roberto Costante, Pomezia (Rome) (IT); Raffaele Ingenito, Pomezia (Rome) (IT); Ashok Bhandari, Pleasanton, CA (US); Brian Frederick, Ben Lomond, CA (US); James Daniel, Newark, CA (US); Tran Trung Tran, Newark, CA (US)

(21) Appl. No.: 18/579,062

(22) PCT Filed: Jul. 14, 2022
(86) PCT No.: PCT/US2022/037221

§ 371 Date: Jan. 12, 2024

Related U.S. Application Data
(60) Provisional application No. 63/221,806, filed on Jul. 14, 2021.

(51) Int. Cl. C07K 14/54; A61K 38/00

(52) U.S. Cl. CPC C07K 14/54; A61K 38/00

(57) ABSTRACT

The present invention relates to novel cyclic peptide inhibitors of the interleukin-23 receptor (IL-23R) or pharmaceutically acceptable salt thereof, corresponding pharmaceutical compositions, methods and/or uses for treatment of autoimmune inflammation and related diseases and disorders. The inhibitor of an interleukin-23 receptor is cyclized by a disulfide bond between penicillamine, cysteine, homocysteine, or alpha methylcysteine residues at positions X4 and X9.

### CROSS-REFERENCE TO RELATED APPLICATION

[0001] This application claims the benefit under 35 U.S.C. § 119 of U.S. Provisional Application No. 63/221,806, filed Jul. 14, 2021 (pending), which is herein incorporated by reference in its entirety, including its respective sequence listing.

### PARTIES TO A JOINT RESEARCH AGREEMENT

[0002] The present disclosure was made by, or on behalf of, the below listed parties to a joint research agreement. The joint research agreement was in effect on or before the date the claimed invention was made, and the claimed invention was part of the joint research agreement and made as a result of activities undertaken within the scope of the joint research agreement. The parties to the joint research agreement are JANSSEN BIOTECH, INC. and PROTAGONIST THERAPEUTICS, INC.

### INCORPORATION OF SEQUENCE LISTING

[0003] The sequence listing in ST.26 XML format entitled 2948-22_ST26.xml, created on Jul. 13, 2022, comprising 2,769,116 bytes, prepared according to 37 CFR 1.822 to 1.824, submitted concurrently with the filing of this application, is incorporated herein by reference in its entirety.

### FIELD OF THE INVENTION

[0004] The present invention relates to novel peptide inhibitors of the interleukin-23 receptor (IL-23R) or pharmaceutically acceptable salts, solvates and/or other forms thereof, invention relates to corresponding pharmaceutical compositions, methods and/or uses of the IL-23R inhibitors for treatment of inflammatory, autoimmune inflammation diseases and/or related disorders.

### BACKGROUND

[0005] The interleukin-23 (IL-23) cytokine has been implicated as playing a crucial role in the pathogenesis of autoimmune inflammation and related diseases and disorders, such as multiple sclerosis, asthma, rheumatoid arthritis, psoriasis, and inflammatory bowel diseases (IBDs), for example, ulcerative colitis and Crohn's disease. Studies in acute and chronic mouse models of IBD revealed a primary role of interleukin-23 receptor (IL-23R) and downstream effector cytokines in disease pathogenesis. IL-23R is expressed on various adaptive and innate immune cells including Th17 cells, γδ T cells, natural killer (NK) cells, dendritic cells, macrophages, and innate lymphoid cells, which are found abundantly in the intestine. At the intestine mucosal surface, the gene expression and protein levels of IL-23R are found to be elevated in IBD patients. It is believed that IL-23 mediates this effect by promoting the development of a pathogenic CD4⁺ T cell population that produces IL-6, IL-17, and tumor necrosis factor (TNF).

[0006] Production of IL-23 is enriched in the intestine, where it is believed to play a key role in regulating the balance between tolerance and immunity through T-cell-dependent and T-cell-independent pathways of intestinal inflammation through effects on T-helper 1 (Th1) and Th17-associated cytokines, as well as restraining regulatory T-cell responses in the gut, favoring inflammation. In addition, polymorphisms in the IL-23 receptor (IL-23R) have been associated with susceptibility to inflammatory bowel diseases (IBDs), further establishing the critical role of the IL-23 pathway in intestinal homeostasis.

[0007] Psoriasis, a chronic skin disease affecting about 2%-3% of the general population has been shown to be mediated by the body's T cell inflammatory response mechanisms. IL-23 has one of several interleukins implicated as a key player in the pathogenesis of psoriasis, purportedly by maintaining chronic autoimmune inflammation via the induction of interleukin-17, regulation of T memory cells, and activation of macrophages. Expression of IL-23 and IL-23R has been shown to be increased in tissues of patients with psoriasis, and antibodies that neutralize IL-23 showed IL-23-dependent inhibition of psoriasis development in animal models of psoriasis.

[0008] IL-23 is a heterodimer composed of a unique p19 subunit and the p40 subunit shared with IL-12, which is a cytokine involved in the development of interferon-γ (IFN-γ)-producing T helper 1 (T_{H}1) cells. Although IL-23 and IL-12 both contain the p40 subunit, they have different phenotypic properties. For example, animals deficient in IL-12 are susceptible to inflammatory autoimmune diseases, whereas IL-23 deficient animals are resistant, presumably due to a reduced number of CD4⁺ T cells producing IL-6, IL-17, and TNF in the CNS of IL-23-deficient animals. IL-23 binds to IL-23R, which is a heterodimeric receptor composed of IL-12Rβ1 and IL-23R subunits. Binding of IL-23 to IL-23R activates the Jak-Stat signaling molecules, Jak2, Tyk2, and Stat1, Stat 3, Stat 4, and Stat 5, although Stat4 activation is substantially weaker and different DNA-binding Stat complexes form in response to IL-23 as compared with IL-12. IL-23R associates constitutively with Jak2 and in a ligand-dependent manner with Stat3. In contrast to IL-12, which acts mainly on naive CD4 (+) T cells, IL-23 preferentially acts on memory CD4 (+) T cells.

[0009] Therapeutic moieties that inhibit the IL-23 pathway have been developed for use in treating IL-23-related diseases and disorders. A number of antibodies that bind to IL-23 or IL-23R have been identified, including ustekinumab, which has been approved for the treatment of moderate to severe plaque psoriasis (PSO), active psoriatic arthritis (PSA), moderately to severely active Crohn's disease (CD) and moderately to severely active ulcerative colitis (UC). Examples of such identified antibodies, include: Tildrakizumab, an anti-IL23 antibody approved for treatment of plaque psoriasis, Guselkumab, an anti-IL23 antibody approved for treatment of psoriatic arthritis and Risankizumab, an anti-IL23 antibody approved for the treatment of plaque psoriasis in the US, and generalized pustular psoriasis, erythrodermic psoriasis and psoriatic arthritis in Japan.

[0010] Although targeted IL-23 antibody therapeutics are used clinically, there are no small-molecule therapeutics that selectively inhibit IL-23 signaling. There are some identified polypeptide inhibitors that bind to IL-23R and inhibit binding of IL-23 to IL-23R (see, e.g., US Patent Application Publication No. US2013/0029907). Thus, there remains a significant need in the art for effective small-molecule and/or polypeptide therapeutic agents to treat and/or prevent IL-23-associated and/or IL23R-associated diseases and disorders, which include, but are not limited to psoriasis (PsO), psoriatic arthritis (PsA), inflammatory bowel diseases (IBD), ulcerative colitis (UC), and Crohn's disease (CD).

[0011] In particular:
[0012] compounds and methods for specific targeting of IL-23R from the luminal side of the gut may provide therapeutic benefit to IBD patients suffering from local inflammation of the intestinal tissue; and/or
[0013] orally bioavailable small molecule and/or polypeptide inhibitors of IL-23 may provide both a non-steroidal treatment option for patients with mild to moderate psoriasis and treatment for moderate to severe psoriasis that does not require delivery by infusion.

[0014] Compounds and methods for specific targeting of the IL-23R from the luminal side of the gut may provide therapeutic benefit to IBD patients suffering from local inflammation of the intestinal tissue. In addition, orally bioavailable small molecule and/or polypeptide inhibitors of IL-23 may provide both a non-steroidal treatment option for patients with mild to moderate psoriasis and treatment for moderate to severe psoriasis that does not require delivery by infusion.

[0015] The present invention is directed to addressing these needs by providing peptide inhibitors or pharmaceutically acceptable salts, solvates and/or other forms thereof, that bind IL-23R to inhibit IL-23 binding and signaling, via different suitable routes of administration, which may include but is not limited to oral administration.

### BRIEF SUMMARY

[0016] In general, the present invention relates to novel peptide inhibitors of the interleukin-23 receptor (IL-23R) or pharmaceutically acceptable salts, solvates and/or other forms thereof, corresponding pharmaceutical compositions, methods and/or uses of the IL-23R inhibitors for treatment of inflammatory, autoimmune inflammation diseases and/or related disorders.

[0017] In particular, the present invention relates to a compound of Formulas (I′), (I) to (III)), or pharmaceutically acceptable salts, solvates and/or other forms thereof. corresponding pharmaceutical compositions, methods and/or uses for treatment of inflammatory, autoimmune inflammation diseases and/or related disorders.

[0018] The peptide inhibitor(s) of the IL-23R of the present invention is represented by linear form structure of Formula (I′):

R1-X3-X4-X5-X6-X7-X8-X9-X10-X11-X12-X13-X14-X15-X16-X17-R2 (I′)

[0019] The linear form structure of Formula (I′) is intended for exemplary and non-limiting purposes, which will be apparent from examples set forth and exemplified throughout the instant specification, i.e., e.g., where each such structure may be longer or shorter than the length of eighteen amino acids and/or other corresponding chemical moieties or functional group substituents as defined herein.

[0020] Specifically in Formula (I′) of the present invention:
[0021] X3-X17, respectively and individually, represent individual amino acid (aa) residues or other corresponding chemical moieties or functional group substituents as described below and in the instant invention;
[0022] R1 represents the N-terminal end, which may be, for example a hydrogen or a chemical moiety or functional group substituted on the amino group;
[0023] Similarly, R2 represents the carboxyl end, which may be, for example the OH of the carboxyl or a chemical moiety or functional group attached thereto or substituted for the OH group (e.g., an amino group to give a terminal amide e.g., —C(O)HN₂);
[0024] Any of the residues as shown in the linear form structure may be present or absent, i.e., e.g., X3 and/or X16-X18 may be absent;
[0025] In certain aspects, the peptide inhibitors may have:
[0026] a bond between positions X4 and X9 (e.g., a pair of Pen residues or Abu and Cys residues) forming a disulfide bond or thioether bond resulting in formation of a first ring structure; and/or
[0027] however the bond forming the first ring structure may, be located between other amino acids or chemical moieties besides X4 and X9; and In other aspects, the peptide inhibitors may have:
[0028] a bond forming a second ring structure resulting in a ring that bridges the first ring structure or a separate ring structure connected by an intervening portion of the molecule.

[0029] The present invention relates to compounds of Formulas (I′), (I) to (X) or pharmaceutically acceptable salts, solvates, or forms thereof, corresponding pharmaceutical compositions methods and/or uses for inflammatory, autoimmune inflammation diseases and/or related disorders.

[0030] In particular, the present invention relates to peptide inhibitor of the IL-23R or a pharmaceutically acceptable salt(s), solvate(s) or other form(s) thereof, corresponding pharmaceutical compositions, methods and/or uses for treatment of disease including inflammatory, autoimmune inflammation diseases and/or related disorders s. In particular, an inhibitor of the IL-23R of the present invention is identified:
[0031] Formulas (I′), (I) to (XX) in the instant specification and disclosure; and/or
[0032] in Table 1A, Table 1B, Table 1C, Table 1D, Table 1E, Table 1F, Table 1G, Table 1H, and Table 1I, respectively, of the present specification.

[0033] In an aspect, the present invention relates to compounds which are inhibitors of an IL-23 receptor comprising an amino acid sequence of Formula (I)

R1-X3-X4-X5-X6-X7-X8-X9-X10-X11-X12-X13-X14-X15-X16-R2 (I)

where:
[0034] R1 is hydrogen, CH₃C(O)—, EtC(O)—, MeSO2, AzCO, BHCO, FPrpTriazoleMeCO, SMSBCO, Biotin, BiotinPEG2PEG2CO or DAGSuc;
[0035] X3 is absent or dR, dK, PEG6, gEPEG6;
[0036] X4 is Pen, aMeC, hC, or C;
[0037] X5 is A, N, Q, N-MeAsn, L, Asn(4C13_2N15), I or K (PEG2PEG2Biotin);
[0038] X6 is T, MeThr, V, K, Dbu, Dpr, or A;
[0039] X7 is W7Me, W, W(4F7Me), 7MeW, 7PhW, 7EtW, 7FW, 7ClW, 5BrW or, 7(3NAcPh)W′
[0040] X8 is KAc, Q, N-MeGln, A, or Cit;
[0041] X9 is Pen, aMeC, hC, or C;
[0042] X10 is F4OMe, AEF, F, F4Me, F4Ad, Nal, AEF(Boc), 4PipPhe, AEF(Ac), Y, 4OMeF, 4AmF, D(Pip), Tzl(mPEG3), 3FTyr, Y(OTzl), Y(OTzl(mPEG3)), Tzl, or Tzl(PEG3OH);
[0043] X11 is Nal, Quin_3, Coumarin(7OMe), 2Nal, or 3Quin;
[0044] X12 is aMeK, THP, Spiral_Pip_Ac, Spiral_Pip, MeK, aMeLeu, aMeL, or aMeK(Boc)
[0045] X13 is KAc, K;
[0046] X14 is A, N, L, N-MeAsn, MeLeu, Asn(4C13_2N15), or I;
[0047] X15 is absent, 3Pya, bAla, Thiozolidine, H, dL, N, A, F, aMePhe, Aib, dK, h, 3MeH, 1MeH, tetraFPhe, bMePhe(SR), 5PyrimidAla, v, dR, homoF, Y, y, F(CF3), Y(CHF2), or THP;
[0048] X16 is MeGly, dL, MeLeu, N-MeNle, y, paf, maf, D3Pya, bAla, P, N(3AmBenzyl)Gly, N(4AmBenzyl)Gly, 4(R)HydroxyPro, 4(S)AminoPro, 5(R)diMePro, or absent
[0049] R2 is —OH, —NH₂, —HN(C₁-C₄ alkyl), —N(C₁-C₄ alkyl)₂, MeNH, or CONHMe; and
   where:
[0050] the inhibitor of an interleukin-23 receptor is cyclized by forming: a disulfide bond between penicillamine, cysteine, homocysteine, or alpha methylcysteine residues at positions X4 and X9.

[0051] The present invention also relates to compounds of Formula I or pharmaceutically acceptable salts, solvates and/or other forms thereof, corresponding pharmaceutical compositions, methods and/or uses for treatment of autoimmune inflammation diseases and related disorders.

[0052] The present invention also relates to compounds of Formula II-XVIII, respectively, or pharmaceutically acceptable salts, solvates and/or other forms thereof, corresponding pharmaceutical compositions, methods and/or uses for treatment of inflammatory, autoimmune inflammation diseases and/or related disorders.

[0053] The present invention also relates to compounds set forth in any of Tables 1A-I, respectively or pharmaceutically acceptable salts, solvates and/or other forms thereof, corresponding pharmaceutical compositions, methods and/or uses for treatment of inflammatory, autoimmune inflammation diseases and/or related disorders.

[0054] The present invention also relates to pharmaceutical composition(s), which comprises a peptide inhibitor compound of the present invention or a pharmaceutically acceptable salt, solvate, or form thereof as described herein, and a pharmaceutically acceptable carrier, excipient, or diluent.

[0055] The present invention further relates to use or inclusion of one or more compounds (i.e., e.g., compounds of formulas (I) to (X), Tables 1A to 1I or as defined herein for preparation of pharmaceutical compositions, which may be used for treatment of inflammatory, autoimmune inflammation diseases and/or related disorders as defined herein.

[0056] The pharmaceutical compositions of the present invention also may comprise or may exclude an absorption enhancer depending on the intended route of delivery or use thereof for treatment of specific indications. The absorption enhancer may be a permeation enhancer and/or an intestinal permeation enhancer. In one aspect, the absorption enhancer improves oral bioavailability.

[0057] The present invention relates to method(s) and/or uses(s) for treating inflammatory, autoimmune inflammation diseases and/or related disorders which comprises administering:
[0058] a therapeutically effective amount of one or more herein-described peptide inhibitor compounds of the IL-23R or pharmaceutically acceptable salts, solvates and/or other forms thereof; or
[0059] a corresponding pharmaceutical composition, respectively
[0060] to a subject or patient in need thereof.

[0061] Such inflammatory, autoimmune inflammation diseases and/or related disorders contemplated for use with or defined in the present invention, may include, but are not limited to, inflammatory bowel disease (IBD), Crohn's disease (CD), ulcerative colitis (UC), psoriasis (PsO), or psoriatic arthritis (PsA) and the like.

[0062] The present invention provides for the use of one or more herein-described compounds of formulas (I) to (X) or Tables 1A to 1I in the treatment of inflammatory, autoimmune inflammation diseases and/or related disorders as defined herein.

[0063] The present invention provides for kits comprising one or more herein-described compounds of formulas (I) to (X) or Tables 1A to 1I and instructions for use in treating a disease, inflammatory, autoimmune inflammation diseases and/or related disorder sin a patient or subject in need thereof.

### DETAILED DESCRIPTION

### I. General

[0064] The present invention relates to novel peptide inhibitors of the IL-23R or pharmaceutically acceptable salt thereof, corresponding pharmaceutical compositions, methods and/or uses for treatment inflammatory, autoimmune inflammation diseases and/or related disorders. The present invention provides or relates to peptide inhibitors of an IL-23R. The peptide inhibitors of the present invention may exhibit enhanced properties, such as longer in vivo half-life, compared to the corresponding cyclic peptide inhibitor of an IL-23R without a cyclic structure.

### II. Definitions

[0065] Unless otherwise defined herein, scientific and technical terms used in this application shall have the meanings that are commonly understood by those of ordinary skill in the art.

[0066] “About” when referring to a value includes the stated value+/−10% of the stated value. For example, about 50% includes a range of from 45% to 55%, while about 20 molar equivalents includes a range of from 18 to 22 molar equivalents. Accordingly, when referring to a range, “about” refers to each of the stated values+/−10% of the stated value of each end of the range. For instance, a ratio of from about 1 to about 3 (weight/weight) includes a range of from 0.9 to 3.3.

[0067] “Patient” or “subject”, which are used interchangeably, refer to a living organism, which includes, but is not limited to a human subject suffering from or prone to a disease or condition that can be treated by administration of a pharmaceutical composition as provided herein. Further non-limiting examples may include, but is not limited to humans, other mammals, bovines, rats, mice, dogs, monkeys, goat, sheep, cows, deer, horse, and other mammalian animals and the like. In some aspects, the patient is human.

[0068] Unless indicated otherwise the names of naturally occurring and non-naturally occurring aminoacyl residues used herein follow the naming conventions suggested by the IUPAC Commission on the Nomenclature of Organic Chemistry and the IUPAC-IUB Commission on Biochemical Nomenclature as set out in “Nomenclature of α-Amino Acids (Recommendations, 1974)” Biochemistry, 14 (2), (1975). To the extent that the names and abbreviations of amino acids and aminoacyl residues employed in this specification and appended claims differ from those suggestions, they will be made clear to the reader. In sequences of amino acids that represent IL-23 inhibitors the individual amino acids are separated by a hyphen “-” or brackets e.g. lysine is shown as [K].

[0069] Throughout the present specification, unless naturally occurring amino acids are referred to by their full name (e.g., alanine, arginine, etc.), they are designated by their conventional three-letter or single-letter abbreviations (e.g., Ala or A for alanine, Arg or R for arginine, etc.). Unless otherwise indicated, three-letter and single-letter abbreviations of amino acids refer to the L-isomeric form of the amino acid in question. The term “L-amino acid,” as used herein, refers to the “L” isomeric form of a peptide, and conversely the term “D-amino acid” refers to the “D” isomeric form of a peptide (e.g., (D) Asp or D-Asp; (D) Phe or D-Phe). Amino acid residues in the D isomeric form can be substituted for any L-amino acid residue, as long as the desired function is retained by the peptide. D-amino acids may be indicated as customary in lower case when referred to using single-letter abbreviations. For example, L-arginine can be represented as “Arg” or “R.” while D-arginine can be represented as “arg” or “r.” Similarly, L-lysine can be represented as “Lys” or “K.” while D-lysine can be represented as “lys” or “k.” Alternatively, a lower case “d” in front of an amino acid can be used to indicate that it is of the D isomeric form, for example D-lysine can be represented by dK.

[0070] In the case of less common or non-naturally occurring amino acids, unless they are referred to by their full name (e.g. sarcosine, ornithine, etc.), frequently employed three- or four-character codes are employed for residues thereof, including, Sar or Sarc (sarcosine, i.e. N-methylglycine), Aib (α-aminoisobutyric acid), Dab (2,4-diaminobutanoic acid), Dapa (2,3-diaminopropanoic acid), γ-Glu (γ-glutamic acid), Gaba (γ-aminobutanoic acid), β-Pro (pyrrolidine-3-carboxylic acid), and Abu (2-amino butyric acid).

[0071] Amino acids of the D-isomeric form may be located at any of the positions in the IL-23R inhibitors set forth herein (any of X1-X18 appearing in the molecule). In an aspects, amino acids of the D-isomeric form may be located only at any one or more of X3, X5, X6, X8, X13, and optionally one additional position. In other aspects, amino acids of the D-isomeric form may be located only at any one or more of X3, X8, X13, and optionally one additional position. In other aspects, amino acids of the D-isomeric form may be located only at any one or more of X8, X13 (e.g., X8 is dK(Ac) and X13 is dE), and optionally one additional position. In other aspects, amino acids of the D-isomeric form may be located only at X3, and optionally one additional position. In other aspects, amino acids of the D-isomeric form may be located only at X3, and optionally two or three additional positions. In other aspects, amino acids of the D-isomeric form may be located at only one or two of positions X1 to X18 appearing in the IL-23R inhibitors set forth herein. In other aspects, amino acids of the D-isomeric form may be located at only three or four of positions X1 to X18 appearing in the IL-23R inhibitors set forth herein. For example an IL-23R inhibitors set forth herein having only positions X3 to X15 present may have amino acids of the D-form present in 3 or four of those positions. In other aspects, amino acids of the D-isomeric form may be located at only five or six of positions X1 to X18 appearing in the IL-23R inhibitors set forth herein.

[0072] As is clear to the skilled artisan, the peptide sequences disclosed herein are shown proceeding from left to right, with the left end of the sequence being the N-terminus of the peptide and the right end of the sequence being the C-terminus of the peptide. Among sequences disclosed herein are sequences incorporating either an “—OH” moiety or an “—NH₂” moiety at the carboxy terminus (C-terminus) of the sequence. In such cases, and unless otherwise indicated, an “—OH” or an “—NH₂” moiety at the C-terminus of the sequence indicates a hydroxy group or an amino group, corresponding to the presence of a carboxylic acid (COOH) or an amido (CONH₂) group at the C-terminus, respectively. In each sequence of the invention, a C-terminal “—OH” moiety may be substituted for a C-terminal “—NH₂” moiety, and vice-versa.

[0073] One of skill in the art will appreciate that certain amino acids and other chemical moieties are modified when bound to another molecule. For example, an amino acid side chain may be modified when it forms an intramolecular bridge with another amino acid side chain, e.g., one or more hydrogen may be removed or replaced by the bond.

[0074] A “compound of the invention”, an “inhibitor of the present disclosure”, an “IL-23R inhibitor of the present disclosure”, a “compound described herein”, and a “herein-described compound” may include, but are not limited to novel compounds disclosed herein, for example the compounds of any of the Examples, i.e., e.g., which may include compounds of Formula (I) to (X). i.e., e.g., such as those found in Table 1A, Table 1B, Table 1C, Table 1D, Table 1E, Table 1F, Table 1G, Table 1H, or Table 1I.

[0075] “Pharmaceutically effective amount” refers to an amount of a compound of the invention in a composition or combination thereof that provides the desired therapeutic or pharmaceutical result.

[0076] By “pharmaceutically acceptable” it is meant the carrier(s), diluent(s), salt(s), solvate(s) or excipient(s) must be compatible with the other components or ingredients of the compositions of the present invention, i.e., that which is useful, safe, non-toxic acceptable for pharmaceutical use. In accordance with the present invention pharmaceutically acceptable means approved or approvable as is listed in the U.S. Pharmacopoeia or other generally recognized pharmacopoeia for use in animals, and more particularly, in humans.

[0077] “Pharmaceutically acceptable excipient” includes without limitation any adjuvant, carrier, excipient, glidant, sweetening agent, diluent, preservative, dye/colorant, flavor enhancer, surfactant, wetting agent, dispersing agent, suspending agent, stabilizer, isotonic agent, solvent, or emulsifier which has been approved by the United States Food and Drug Administration as being acceptable for use in humans or domestic animals.

[0078] “Absorption enhancer” refers to a component that improves or facilitates the mucosal absorption of a drug in the gastrointestinal tract, such as a permeation enhancer or intestinal permeation enhancer. As conventionally understood in the art, permeation enhancers (PEs) are agents aimed to improve oral delivery of therapeutic drugs with poor bioavailability. PEs are capable of increasing the paracellular and/or transcellular passage of drugs.

[0079] Pharmaceutical excipients that can increase permeation have been termed “absorption modifying excipients” (AMEs). AMEs may be used in oral compositions, for example, as wetting agents (sodium dodecyl sulfate), antioxidants (e.g. EDTA), and emulsifiers (e.g. macrogol glycerides), and may be specifically included in compositions as PEs to improve bioavailability. PEs can be categorized as to how they alter barrier integrity via paracellular or transcellular routes.

[0080] “Intestinal permeation enhancer (IPE)” refers to a component that improves the bioavailability of a component. Suitable representative IPEs for use in the present invention, include, but are not limited to, various surfactants, fatty acids, medium chain glycerides, steroidal detergents, acyl carnitine and alkanoylcholines, N-acetylated alpha-amino acids and N-acetylated non-alpha-amino acids, and chitosans, other mucoadhesive polymers and the like. For example, a suitable IPE for use in the present invention may be sodium caprate.

[0081] “Composition” or “Pharmaceutical Composition” as used herein is intended to encompass an invention or product comprising the specified active product ingredient (API), which may include pharmaceutically acceptable excipients, carriers or diluents as described herein, such as in specified amounts defined throughout the disclosure. Compositions or Pharmaceutical Compositions result from combination of specific components, such as specified ingredients in the specified amounts as described herein.

[0082] Compositions or pharmaceutical compositions of the present invention may be in different pharmaceutically acceptable forms, which may include, but are not limited to a liquid composition, a tablet or matrix composition, a capsule composition, etc. and the like. When the composition is a tablet composition, the tablet may include, but is not limited to different layers two or more different phases, including an internal phase and an external phase that can comprise a core. The tablet composition can also include, but is not limited to one or more coatings.

[0083] “Solvate” as used herein, means a physical association of the compound of the present invention with one or more solvent molecules. This physical association involves varying degrees bonding, including hydrogen bonding. In certain instances, the solvate will be capable of isolation. The term “solvate” is intended to encompass both solution-phase and isolatable solvates. Non-limiting examples of suitable solvates include hydrates.

[0084] Provided are also pharmaceutically acceptable salts and tautomeric forms of the compounds described herein. “Pharmaceutically acceptable” or “physiologically acceptable” refer to compounds, salts, compositions, dosage forms and other materials which are useful in preparing a pharmaceutical composition that is suitable for veterinary or human pharmaceutical use.

[0085] The IL-23R inhibitors of the present invention, pharmaceutically acceptable salts, solvates and/or other forms thereof may contain one or more asymmetric centers and may thus give rise to enantiomers, diastereomers, and other stereoisomeric forms that may be defined, in terms of absolute stereochemistry, as (R)- or (S)- or, as (D)- or (L)- for amino acids. The present disclosure is meant to include all such possible isomers, as well as their racemic and optically pure forms of the IL-23R inhibitors of the present disclosure. Optically active (+) and (−), (R)- and (S)-, or (D)- and (L)-isomers may be prepared using chiral synthons or chiral reagents, or resolved using conventional techniques, for example, chromatography and fractional crystallization. Conventional techniques for the preparation/isolation of individual enantiomers include chiral synthesis from a suitable optically pure precursor or resolution of the racemate (or the racemate of a salt or derivative) using, for example, chiral high pressure liquid chromatography (HPLC). When the compounds described herein contain olefinic double bonds or other centers of geometric asymmetry, and unless specified otherwise, it is intended that the compounds include both E and Z geometric isomers. Likewise, all tautomeric forms are also intended to be included. Where compounds are represented in their chiral form, it is understood that the aspect encompasses, but is not limited to, the specific diastereomerically or enantiomerically enriched form. Where chirality is not specified but is present, it is understood that the aspect is directed to either the specific diastereomerically or enantiomerically enriched form; or a racemic or scalemic mixture of such compound(s). As used herein, “scalemic mixture” is a mixture of stereoisomers enantiomers at a ratio other than 1:1.

[0086] “Racemates” refers to a mixture of enantiomers. The mixture can include equal or unequal amounts of each enantiomer.

[0087] “Stereoisomer” and “stereoisomers” refer to compounds that differ in the chirality of one or more stereo centers. Stereoisomers include enantiomers and diastereomers. The compounds may exist in stereoisomeric form if they possess one or more asymmetric centers or a double bond with asymmetric substitution and, therefore, can be produced as individual stereoisomers or as mixtures. Unless otherwise indicated, the description is intended to include individual stereoisomers as well as mixtures. The methods for the determination of stereochemistry and the separation of stereoisomers are well-known in the art (see, e.g., Chapter 4 of Advanced Organic Chemistry, 4th ed., J. March, John Wiley and Sons, New York, 1992).

[0088] “Tautomer” refers to alternate forms of a compound that differ in the position of a proton, such as enol-keto and imine-enamine tautomers, or the tautomeric forms of heteroaryl groups containing a ring atom attached to both a ring-NH— and a ring=N— such as pyrazoles, imidazoles, benzimidazoles, triazoles, and tetrazoles.

[0089] Unless defined otherwise, all technical and scientific terms used herein have the same meaning as commonly or conventionally understood by one of ordinary skill in the art. In the chemical arts a dash at the front or end of a chemical group is a matter of convenience; chemical groups may be depicted with or without one or more dashes without losing their ordinary meaning. A wavy line drawn through a line in a structure indicates a point of attachment of a group. A dashed line indicates an optional bond. Unless chemically or structurally required, no directionality is indicated or implied by the order in which a chemical group is written or the point at which it is attached to the remainder of the molecule. For instance, the group “—SO₂CH₂—” is equivalent to “—CH₂SO₂—” and both may be connected in either direction. Similarly, an “arylalkyl” group, for example, may be attached to the remainder of the molecule at either an aryl or an alkyl portion of the group. A prefix such as “Cᵤ₋ᵥ” or (Cᵤ-Cᵥ) indicates that the following group has from u to v carbon atoms. For example, “C₁₋₆alkyl” and “C₁-C₆ alkyl” both indicate that the alkyl group has from 1 to 6 carbon atoms.

[0090] “Treatment” or “treat” or “treating” as used herein refers to an approach for obtaining beneficial or desired results. For purposes of the present invention, beneficial or desired results include, but are not limited to, alleviation of a symptom and/or diminishment of the extent of a symptom and/or preventing a worsening of a symptom associated with a disease or condition. In one aspect, “treatment” or “treating” includes one or more of the following: (a) inhibiting the disease or condition (e.g., decreasing one or more symptoms resulting from the disease or condition, and/or diminishing the extent of the disease or condition); (b) slowing or arresting the development of one or more symptoms associated with the disease or condition (e.g., stabilizing the disease or condition, delaying the worsening or progression of the disease or condition); and (c) relieving the disease or condition, e.g., causing the regression of clinical symptoms, ameliorating the disease state, delaying the progression of the disease, increasing the quality of life, and/or prolonging survival.

[0091] “Therapeutically effective amount” or “effective amount” as used herein refers to an amount that is effective to elicit the desired biological or medical response, including the amount of a compound that, when administered to a subject for treating a disease is sufficient to effect such treatment for the disease. The effective amount will vary depending on the compound, the disease, and its severity and the age, weight, etc., of the subject to be treated. The effective amount can include a range of amounts. As is understood in the art, an effective amount may be in one or more doses, i.e., a single dose or multiple doses may be required to achieve the desired treatment endpoint. An effective amount may be considered in the context of administering one or more therapeutic agents, and a single agent may be considered to be given in an effective amount if, in conjunction with one or more other agents, a desirable or beneficial result may be or is achieved. Suitable doses of any co-administered compounds may optionally be lowered due to the combined action (e.g., additive or synergistic effects) of the compounds.

[0092] “Co-administration” as used herein refers to administration of unit dosages of the compounds disclosed herein before or after administration of unit dosages of one or more additional therapeutic agents, for example, administration of the compound disclosed herein within seconds, minutes, or hours of the administration of one or more additional therapeutic agents. For example, in some aspects, a unit dose of a compound of the invention is administered first, followed within seconds or minutes by administration of a unit dose of one or more additional therapeutic agents. Alternatively, in other aspects, a unit dose of one or more additional therapeutic agents is administered first, followed by administration of a unit dose of a compound of the invention within seconds or minutes. In some aspects, a unit dose of a compound of the invention is administered first, followed, after a period of hours (e.g., 1-12 hours), by administration of a unit dose of one or more additional therapeutic agents. In other aspects, a unit dose of one or more additional therapeutic agents is administered first, followed, after a period of hours (e.g., 1-12 hours), by administration of a unit dose of a compound of the invention. Co-administration of a compound disclosed herein with one or more additional therapeutic agents generally refers to simultaneous or sequential administration of a compound disclosed herein and one or more additional therapeutic agents, such that therapeutically effective amounts of each agent are present in the body of the patient.

[0093] Abbreviation, “(V/V)” refers to the phrase “volume for volume”, i.e., the proportion of a particular substance within a mixture, as measured by volume or a volume amount of a component of the composition disclosed herein relative to the total volume amount of the composition. Accordingly, the quantity is unit less and represents a volume percentage amount of a component relative to the total volume of the composition. For example, a 2% (V/V) solvent mixture can indicate 2 mL of one solvent is present in 100 mL of the solvent mixture.

[0094] Abbreviation, “(w/w)” refers to the phrase “weight for weight”, i.e., the proportion of a particular substance within a mixture, as measured by weight or mass or a weight amount of a component of the composition disclosed herein relative to the total weight amount of the composition. Accordingly, the quantity is unit less and represents a weight percentage amount of a component relative to the total weight of the composition. For example, a 2% (w/w) solution can indicate 2 grams of solute is dissolved in 100 grams of solution.

[0095] Systemic routes of administration as conventionally understood in the medicinal or pharmaceutical arts, refer to or are defined as a route of administration of drug, a pharmaceutical composition or formulation, or other substance into the circulatory system so that various body tissues and organs are exposed to the drug, formulation or other substance. As conventionally understood in the art, administration can take place orally (where drug or oral preparations are taken by mouth, and absorbed via the gastrointestinal tract), via enteral administration (absorption of the drug also occurs through the gastrointestinal tract) or parenteral administration (generally injection, infusion, or implantation, etc.

[0096] “Systemically active” peptide drug therapy as it relates to the present invention generally refers to treatment by means of a pharmaceutical composition comprising a peptide active ingredient, wherein said peptide resists immediate metabolism and/or excretion resulting in its exposure in various body tissues and organs, such as the cardiovascular, respiratory, gastrointestinal, nervous or immune systems.

[0097] Systemic drug activity in the present invention also refers to treatment using substances that travel through the bloodstream, reaching and affecting cells in various body tissues and organs. Systemic active drugs are transported to their site of action and work throughout the body to attack the physiological processes that cause inflammatory diseases.

[0098] “Bioavailability” refers to the extent and rate at which the active moiety (drug or metabolite) enters systemic circulation, thereby accessing the site of action. Bioavailability of a drug is impacted by the properties of the dosage form, which depend partly on its design and manufacture.

[0099] “Digestive tract tissue” as used herein refers to all the tissues that comprise the organs of the alimentary canal. For example only, and without limitation, “digestive tract tissue” includes tissues of the mouth, esophagus, stomach, small intestine, large intestine, duodenum, and anus.

### III. Compounds

[0100] The present invention relates to novel cyclic peptide inhibitors of the interleukin-23 receptor (IL-23R) or pharmaceutically acceptable salt thereof.

[0101] In particular, the present invention relates to a cyclic peptide inhibitors of the interleukin-23 receptor (IL-23R) or a pharmaceutically acceptable salt thereof, including those for which a structure is as identified in Table 1A, Table 1B, Table 1C, Table 1D, Table 1E, Table 1F, Table 1G, Table 1H, or Table 11 of the present specification.

[0102] In one aspect, a cyclic peptide inhibitor compound of the interleukin-23 receptor (IL-23R) compound, or a pharmaceutically acceptable salt thereof, has a structure of a compound in Table 1A.

[0103] In another aspect, a cyclic peptide inhibitor compound of the interleukin-23 receptor (IL-23R) compound or a pharmaceutically acceptable salt thereof, has a structure of a compound in Table 1B.

[0104] In another aspect, a cyclic peptide inhibitor compound of the interleukin-23 receptor (IL-23R) compound or a pharmaceutically acceptable salt thereof, has a structure of a compound in Table 1C.

[0105] In another aspect, a cyclic peptide inhibitor compound of the interleukin-23 receptor (IL-23R) compound or a pharmaceutically acceptable salt thereof, has a structure of a compound in Table 1D.

[0106] In another aspect, a cyclic peptide inhibitor compound of the interleukin-23 receptor (IL-23R) compound or a pharmaceutically acceptable salt thereof, has a structure of a compound in Table 1E.

[0107] In another aspect, a cyclic peptide inhibitor compound of the interleukin-23 receptor (IL-23R) compound or a pharmaceutically acceptable salt thereof, has a structure of a compound in Table 1F.

[0108] In another aspect, a cyclic peptide inhibitor compound of the interleukin-23 receptor (IL-23R) compound or a pharmaceutically acceptable salt thereof, has a structure of a compound in Table 1G

[0109] In another aspect, a peptide inhibitor compound of the interleukin-23 receptor (IL-23R) compound, or a pharmaceutically acceptable salt thereof, has a structure of a compound in Table 1H.

[0110] In another aspect, a peptide inhibitor compound of the interleukin-23 receptor (IL-23R) compound, or a pharmaceutically acceptable salt thereof, has a structure of a compound in Table 1I.

Lengthy table referenced here
US20240409598A1-20241212-T00001
Please refer to the end of the specification for access instructions.

Lengthy table referenced here
US20240409598A1-20241212-T00002
Please refer to the end of the specification for access instructions.

Lengthy table referenced here
US20240409598A1-20241212-T00003
Please refer to the end of the specification for access instructions.

Lengthy table referenced here
US20240409598A1-20241212-T00004
Please refer to the end of the specification for access instructions.

Lengthy table referenced here
US20240409598A1-20241212-T00005
Please refer to the end of the specification for access instructions.

Lengthy table referenced here
US20240409598A1-20241212-T00006
Please refer to the end of the specification for access instructions.

Lengthy table referenced here
US20240409598A1-20241212-T00007
Please refer to the end of the specification for access instructions.

Lengthy table referenced here
US20240409598A1-20241212-T00008
Please refer to the end of the specification for access instructions.

Lengthy table referenced here
US20240409598A1-20241212-T00009
Please refer to the end of the specification for access instructions.

### Synthesis

[0111] The compounds described herein may be synthesized by many techniques that are known to those skilled in the art. In certain aspects, monomer subunits are synthesized and purified using the techniques described in the accompanying Examples. In some aspects, the present invention provides a method of producing a compound (or monomer subunit thereof) of the invention, comprising chemically synthesizing a peptide having an amino acid sequence described herein, including but not limited to any of the amino acid sequences set forth in the compounds of Formula (I) to Formula (X), Table 1A, Table 1B, Table 1C, Table 1D, Table 1E, Table 1F, Table 1G, Table 1H, and Table 1I herein. In some aspects, a portion of the peptide is recombinantly synthesized, instead of being chemically synthesized. In some aspects, methods of producing a compound further include cyclizing the compound precursor after the constituent subunits have been attached. In particular aspects, cyclization is accomplished via any of the various methods described herein.

[0112] Substituted tryptophans may be prepared by any suitable route. Preparation of certain substituted tryptophans including those substituted at the 7 position, such as 7-ethyl-L-tryptophans, are described in, for example WO 2021/146441 A1.

[0113] The present invention further describes synthesis of compounds described herein, such as the compounds of Formulas (I) to (XX) and the compounds of Table 1A, Table 1B, Table 1C, Table 1D, Table 1E, Table 1F, Table 1G, Table 1H, and Table 1I. In some aspects, one or more of the amino acid residues or amino acid monomers are lipidated and then covalently attached to one another to form a compound of the invention. In some aspects, one or more of the amino acid residues or amino acid monomers are covalently attached to one another and lipidated at an intermediate oligomer stage before attaching additional amino acids and cyclization to form a compound of the invention. In some aspects, a cyclic peptide is synthesized and then lipidated to form a compound of the invention. Illustrative synthetic methods are described in the Examples.

[0114] The present invention further describes synthesis of compounds described herein, such as the compounds of Formulas (I) to Formula (X), and the compounds of Table 1A, Table 1B, Table 1C, Table 1D, Table 1E, Table 1F, Table G, Table 1H, and Table 1I. Illustrative synthetic methods are described in the Examples.

### IV. Pharmaceutical Compositions

[0115] The present invention relates to pharmaceutical composition which comprise an IL-23R inhibitor of the present invention. The present invention includes pharmaceutical compositions comprising one or more inhibitors of the present invention and a pharmaceutically acceptable carrier, diluent or excipient. The pharmaceutically acceptable carrier, diluent or excipient may be a solid, semi-solid or liquid filler, diluent, encapsulating material or formulation auxiliary of any type. Prevention of the action of microorganisms may be ensured by the inclusion of various antibacterial and antifungal agents, for example, paraben, chlorobutanol, phenol sorbic acid, and the like. It may also be desirable to include isotonic agents such as sugars, sodium chloride, and the like.

[0116] The pharmaceutical compositions may be administered orally, parenterally, intracisternally, intravaginally, intraperitoneally, intrarectally, topically (as by powders, ointments, drops, suppository, or transdermal patch), by inhalation (such as intranasal spray), ocularly (such as intraocularly) or buccally. The term “parenteral” as used herein refers to modes of administration which include intravenous, intramuscular, intraperitoneal, intrasternal, subcutaneous, intradermal and intraarticular injection and infusion. Accordingly, in certain embodiments, the compositions are formulated for delivery by any of these routes of administration. A pharmaceutical composition may be formulated for and administered orally. A pharmaceutical composition may be formulated for and administered parenterally.

[0117] In a particular aspect, an IL-23R inhibitor of the present invention, is suspended in a sustained-release matrix. A sustained-release matrix, as used herein, is a matrix made of materials, usually polymers, which are degradable by enzymatic or acid-base hydrolysis or by dissolution. Once inserted into the body, the matrix is acted upon by enzymes and body fluids. A sustained-release matrix desirably is chosen from biocompatible materials such as liposomes, polylactides (polylactic acid), polyglycolide (polymer of glycolic acid), polylactide co-glycolide (copolymers of lactic acid and glycolic acid) polyanhydrides, poly(ortho)esters, polypeptides, hyaluronic acid, collagen, chondroitin sulfate, carboxylic acids, fatty acids, phospholipids, polysaccharides, nucleic acids, polyamino acids, amino acids such as phenylalanine, tyrosine, isoleucine, polynucleotides, polyvinyl propylene, polyvinylpyrrolidone and silicone. One embodiment of a biodegradable matrix is a matrix of one of either polylactide, polyglycolide, or polylactide co-glycolide (co-polymers of lactic acid and glycolic acid).

[0118] The IL-23R inhibitors of the present invention may be prepared and/or formulated as pharmaceutically acceptable salts, solvates and/or other forms thereof or when appropriate in neutral form. Pharmaceutically acceptable salts are non-toxic salts of a neutral form of a compound that possess the desired pharmacological activity of the neutral form. These salts may be derived from inorganic or organic acids or bases. For example, a compound that contains a basic nitrogen may be prepared as a pharmaceutically acceptable salt by contacting the compound with an inorganic or organic acid. Non-limiting examples of pharmaceutically acceptable salts include sulfates, pyrosulfates, bisulfates, sulfites, bisulfites, phosphates, monohydrogen-phosphates, dihydrogenphosphates, metaphosphates, pyrophosphates, chlorides, bromides, iodides, acetates, propionates, decanoates, caprylates, acrylates, formates, isobutyrates, caproates, heptanoates, propiolates, oxalates, malonates, succinates, suberates, sebacates, fumarates, maleates, butyne-1,4-dioates, hexyne-1,6-dioates, benzoates, chlorobenzoates, methylbenzoates, dinitrobenzoates, hydroxybenzoates, methoxybenzoates, phthalates, sulfonates, methylsulfonates, propylsulfonates, besylates, xylenesulfonates, naphthalene-1-sulfonates, naphthalene-2-sulfonates, phenylacetates, phenylpropionates, phenylbutyrates, citrates, lactates, γ-hydroxybutyrates, glycolates, tartrates, and mandelates. Lists of other suitable pharmaceutically acceptable salts are found in Remington: The Science and Practice of Pharmacy, 21^{st} Edition, Lippincott Wiliams and Wilkins, Philadelphia, Pa., 2006.

[0119] Examples of “pharmaceutically acceptable salts” of the compounds disclosed herein also include salts derived from an appropriate base, such as an alkali metal (for example, sodium, potassium), an alkaline earth metal (for example, magnesium), ammonium and NX₄⁺ (wherein X is C₁-C₄ alkyl). Also included are base addition salts, such as sodium or potassium salts.

[0120] The present invention relates to pharmaceutical compositions comprising an IL-23R inhibitor of the present invention or pharmaceutically acceptable salts, isomers, or a mixture thereof, in which from 1 to n hydrogen atoms attached to a carbon atom may be replaced by a deuterium atom or D, in which n is the number of hydrogen atoms in the molecule. As known in the art, the deuterium atom is a non-radioactive isotope of the hydrogen atom. Such compounds may increase resistance to metabolism, and thus may be useful for increasing the half-life of the compounds described herein or pharmaceutically acceptable salts, isomer, or a mixture thereof when administered to a mammal. See, e.g., Foster, “Deuterium Isotope Effects in Studies of Drug Metabolism,” Trends Pharmacol. Sci., 5 (12): 524-527 (1984). Such compounds are synthesized by means well known in the art, for example by employing starting materials in which one or more hydrogen atoms have been replaced by deuterium.

[0121] Examples of isotopes that can be incorporated into the disclosed compounds also include isotopes of hydrogen, carbon, nitrogen, oxygen, phosphorous, fluorine, chlorine, and iodine, such as ²H, ³H, ¹¹C, ¹³C, ¹⁴C, ¹³N, ¹⁵N, ¹⁵O, ¹⁷O, ¹⁸O, ³¹P, ³²P, ³⁵S, ¹⁸F, ³⁶C, ¹²³I, and ¹²⁵I, respectively. Substitution with positron emitting isotopes, such as ¹¹C, ¹⁸F, ¹⁵O and ¹³N, can be useful in Positron Emission Topography (PET) studies for examining substrate receptor occupancy. Isotopically-labeled compounds of Formula (I), can generally be prepared by conventional techniques known to those skilled in the art or by processes analogous to those described in the Examples as set out below using an appropriate isotopically-labeled reagent in place of the non-labeled reagent previously employed.

[0122] In certain aspects, pharmaceutical compositions for parenteral injection comprise pharmaceutically acceptable sterile aqueous or nonaqueous solutions, dispersions, suspensions or emulsions, or sterile powders, for reconstitution into sterile injectable solutions or dispersions just prior to use. Examples of suitable aqueous and nonaqueous carriers, diluents, solvents or vehicles include water, ethanol, polyols (such as glycerol, propylene glycol, polyethylene glycol, and the like), carboxymethylcellulose and suitable mixtures thereof, β-cyclodextrin, vegetable oils (such as olive oil), and injectable organic esters such as ethyl oleate. Proper fluidity may be maintained, for example, by the use of coating materials such as lecithin, by the maintenance of the required particle size in the case of dispersions, and by the use of surfactants. These compositions may also contain adjuvants such as preservative, wetting agents, emulsifying agents, and dispersing agents. Prolonged absorption of an injectable pharmaceutical form may be brought about by the inclusion of agents which delay absorption, such as aluminum monostearate and gelatin.

[0123] Injectable depot forms include those made by forming microencapsulated matrices of the peptide inhibitor in one or more biodegradable polymers such as polylactide-polyglycolide, poly(orthoesters), poly(anhydrides), and (poly)glycols, such as PEG. Depending upon the ratio of peptide to polymer and the nature of the particular polymer employed, the rate of release of the peptide inhibitor can be controlled. Depot injectable formulations are also prepared by entrapping the peptide inhibitor in liposomes or microemulsions compatible with body tissues.

[0124] The injectable formulations may be sterilized, for example, by filtration through a bacterial-retaining filter, or by incorporating sterilizing agents in the form of sterile solid compositions which can be dissolved or dispersed in sterile water or other sterile injectable medium just prior to use.

[0125] Topical administration includes administration to the skin or mucosa, including surfaces of the lung and eye. Compositions for topical lung administration, including those for inhalation and intranasal, may involve solutions and suspensions in aqueous and non-aqueous formulations and can be prepared as a dry powder which may be pressurized or non-pressurized. In non-pressurized powder compositions, the active ingredient may be finely divided form may be used in admixture with a larger-sized pharmaceutically acceptable inert carrier comprising particles having a size, for example, of up to 100 micrometers in diameter. Suitable inert carriers include sugars such as lactose.

[0126] Alternatively, a pharmaceutical composition of the present invention may be pressurized and contain a compressed gas, such as nitrogen or a liquefied gas propellant. The liquefied propellant medium and indeed the total composition may be such that the active ingredient does not dissolve therein to any substantial extent. The pressurized composition may also contain a surface active agent, such as a liquid or solid non-ionic surface active agent or may be a solid anionic surface active agent. It is preferred to use the solid anionic surface active agent in the form of a sodium salt.

[0127] A further form of topical administration is to the eye. A peptide inhibitor of the present invention may be delivered in a pharmaceutically acceptable ophthalmic vehicle, such that the peptide inhibitor is maintained in contact with the ocular surface for a sufficient time period to allow the peptide inhibitor to penetrate the corneal and internal regions of the eye, as for example the anterior chamber, posterior chamber, vitreous body, aqueous humor, vitreous humor, cornea, iris/ciliary, lens, choroid/retina and sclera. The pharmaceutically acceptable ophthalmic vehicle may, for example, be an ointment, vegetable oil or an encapsulating material. Alternatively, the peptide inhibitors of the invention may be injected directly into the vitreous and aqueous humor.

[0128] Compositions for rectal or vaginal administration include suppositories which may be prepared by mixing the peptide inhibitors of this invention with suitable non-irritating excipients or carriers such as cocoa butter, polyethylene glycol or a suppository wax, which are solid at room temperature but liquid at body temperature and, therefore, melt in the rectum or vaginal cavity and release the active compound.

[0129] Peptide inhibitors of the present invention may also be administered in liposomes or other lipid-based carriers. As is known in the art, liposomes are generally derived from phospholipids or other lipid substances. Liposomes are formed by mono- or multi-lamellar hydrated liquid crystals that are dispersed in an aqueous medium. Any non-toxic, physiologically acceptable and metabolizable lipid capable of forming liposomes can be used. The present compositions in liposome form can contain, in addition to a peptide inhibitor of the present invention, stabilizers, preservatives, excipients, and the like. In certain embodiments, the lipids comprise phospholipids, including the phosphatidyl cholines (lecithins) and serines, both natural and synthetic. Methods to form liposomes are known in the art.

[0130] Pharmaceutical compositions suitable for parenteral administration in a method or use described herein may comprise sterile aqueous solutions and/or suspensions of the IL:-23R inhibitors made isotonic with the blood of the recipient, generally using sodium chloride, glycerin, glucose, mannitol, sorbitol, and the like.

[0131] The present invention provides a pharmaceutical composition for oral delivery. Compositions and peptide inhibitors of the present invention may be prepared for oral administration according to any of the methods, techniques, and/or delivery vehicles described herein. Further, one having skill in the art will appreciate that the peptide inhibitors of the instant invention may be modified or integrated into a system or delivery vehicle that is not disclosed herein, yet is well known in the art and compatible for use in oral delivery of peptides.

[0132] Formulations for oral administration may comprise adjuvants (e.g. resorcinols and/or nonionic surfactants such as polyoxyethylene oleyl ether and n-ether) to artificially increase the permeability of the intestinal walls, and/or enzymatic inhibitors (e.g. pancreatic trypsin inhibitors, diisopropylfluorophosphate (DFF) or trasylol) to inhibit enzymatic degradation. In certain embodiments, the peptide inhibitor of a solid-type dosage form for oral administration can be mixed with at least one additive, such as sucrose, lactose, cellulose, mannitol, trehalose, raffinose, maltitol, dextran, starches, agar, alginates, chitins, chitosans, pectins, gum tragacanth, gum arabic, gelatin, collagen, cascin, albumin, synthetic or semisynthetic polymer, or glyceride. These formulations for oral administration can also contain other type(s) of additives, e.g., inactive diluting agent, lubricant such as magnesium stearate, paraben, preserving agent such as sorbic acid, ascorbic acid, alpha-tocopherol, antioxidants such as cysteine, disintegrators, binders, thickeners, buffering agents, pH adjusting agents, sweetening agents, flavoring agents or perfuming agents.

[0133] In particular aspects, oral dosage forms or unit doses compatible for use with the peptide inhibitors of the present invention may include a mixture of peptide inhibitor and nondrug components or excipients, as well as other non-reusable materials that may be considered either as an ingredient or packaging. Oral compositions may include at least one of a liquid, a solid, and a semi-solid dosage forms. In some embodiments, an oral dosage form is provided comprising an effective amount of peptide inhibitor, wherein the dosage form comprises at least one of a pill, a tablet, a capsule, a gel, a paste, a drink, a syrup, ointment, and suppository. In some instances, an oral dosage form is provided that is designed and configured to achieve delayed release of the peptide inhibitor in the subject's small intestine and/or colon.

[0134] Tablets may contain excipients, glidants, fillers, binders and the like. Aqueous compositions are prepared in sterile form, and when intended for delivery by other than oral administration generally will be isotonic. Compositions may optionally contain excipients such as those set forth in the “Handbook of Pharmaceutical Excipients” (1986). Excipients include ascorbic acid and other antioxidants, chelating agents such as EDTA, carbohydrates such as dextran, hydroxyalkylcellulose, hydroxyalkylmethylcellulose, stearic acid and the like. The pH of the compositions ranges from, for example, about 3 to about 11. The pH of the compositions may, for example, range from about 5 to about 7 or from about 7 to about 10.

[0135] An oral pharmaceutical composition of the present invention may comprise an IL-23R inhibitor of the present invention may comprise an enteric coating that is designed to delay release of the IL-23R inhibitor in the small intestine. The invention relates to a pharmaceutical composition that comprises an IL-23R inhibitor of the present invention and a protease inhibitor, such as aprotinin, in a delayed release pharmaceutical formulation. Pharmaceutical compositions (e.g., oral pharmaceutical compositions) may comprise an enteric coat that is soluble in gastric juice at a pH of about 5.0 or higher. Such enteric coatings may comprise a polymer having dissociable carboxylic groups, such as derivatives of cellulose, including hydroxypropylmethyl cellulose phthalate, cellulose acetate phthalate and cellulose acetate trimellitate and similar derivatives of cellulose and other carbohydrate polymers.

[0136] An oral pharmaceutical composition comprising an IL-23R inhibitor of the present invention that comprises an IL-23R inhibitor may comprise an enteric coating that is designed to protect and release the pharmaceutical composition in a controlled manner within the subject's lower gastrointestinal system, and to avoid systemic side effects. In addition to enteric coatings, the peptide inhibitors of the instant invention may be encapsulated, coated, engaged or otherwise associated within any compatible oral drug delivery system or component. For example, in some embodiments an IL-23R inhibitor of the present invention is provided in a lipid carrier system comprising at least one of polymeric hydrogels, nanoparticles, microspheres, micelles, and other lipid systems.

[0137] To overcome peptide degradation of an IL-23R inhibitor of the present invention in the small intestine, the pharmaceutical compositions may comprise a hydrogel polymer carrier system in which a peptide inhibitor of the present invention is contained, whereby the hydrogel polymer protects the IL-23R inhibitor from proteolysis in the small intestine and/or colon. The an IL-23R inhibitor may further be formulated for compatible use with a carrier system that is designed to increase the dissolution kinetics and enhance intestinal absorption of the peptide. These methods include the use of liposomes, micelles and nanoparticles to increase GI tract permeation of peptides.

[0138] Various bioresponsive systems may also be combined with one or more an IL-23R inhibitors of the present invention to provide a pharmaceutical agent for oral delivery. For example, an IL-23R inhibitor of the present invention may be used in combination with a bioresponsive system, such as hydrogels and mucoadhesive polymers with hydrogen bonding groups (e.g., PEG, poly(methacrylic) acid [PMAA], cellulose, Eudragit®, chitosan and alginate) to provide a therapeutic agent for oral administration.

[0139] In certain aspects, pharmaceutical composition and formulations may include an IL-23R inhibitor of the present invention and one or more absorption enhancers, enzyme inhibitors, or mucoso adhesive polymers. In an embodiment, the absorption enhancer may be an intestinal permeation enhancer.

[0140] IL-23R inhibitors of the present invention may be formulated in a formulation vehicle, such as, e.g., emulsions, liposomes, microsphere or nanoparticles.

[0141] The present invention provides for a method for treating a subject with an IL-23R inhibitor of the present invention having an increased half-life. In one aspect, the present invention provides a peptide inhibitor having a half-life of at least several hours to one day in vitro or in vivo (e.g., when administered to a human subject) sufficient for daily (q.d.) or twice daily (b.i.d.) dosing of a therapeutically effective amount. In certain embodiments, the IL-23R inhibitor has a half-life of three days or longer sufficient for weekly (q.w.) dosing of a therapeutically effective amount. In certain embodiments, the IL-23R inhibitor has a half-life of eight days or longer sufficient for bi-weekly (b.i.w.) or monthly dosing of a therapeutically effective amount. In certain embodiments, the IL-23R inhibitor is derivatized or modified such that is has a longer half-life as compared to the underivatized or unmodified peptide inhibitor. In certain embodiments, the IL-23R inhibitor contains one or more chemical modifications to increase serum half-life.

[0142] When used in at least one of the treatments or delivery systems described herein, a peptide inhibitor of the present invention may be employed in pure form or, where such forms exist, in pharmaceutically acceptable salt form.

[0143] The total daily usage of the IL-23R inhibitor and compositions of the present invention can be decided by the attending physician within the scope of sound medical judgment. The specific therapeutically effective dose level for any particular subject will depend upon a variety of factors including: a) the disorder being treated and the severity of the disorder; b) activity of the specific compound employed; c) the specific composition employed, the age, body weight, general health, sex and diet of the patient; d) the time of administration, route of administration, and rate of excretion of the specific peptide inhibitor employed; e) the duration of the treatment; f) drugs used in combination or coincidental with the specific peptide inhibitor employed, and like factors well known in the medical arts.

[0144] In particular embodiments, the total daily dose of a IL-23R inhibitor of the present invention to be administered to a human or other mammal host in single or divided doses may be in amounts, for example, from 0.0001 to 300 mg/kg body weight daily or 1 to 300 mg/kg body weight daily.

[0145] The compositions may conveniently be presented in unit dosage form and can be prepared by any of the methods well known in the art of pharmacy. Techniques and compositions generally are found in Remington's Pharmaceutical Sciences (Mack Publishing Co., Easton, PA). Such methods include the step of bringing into association the active ingredient with the carrier which constitutes one or more accessory ingredients. In general the compositions are prepared by uniformly and intimately bringing into association the active ingredient with liquid carriers or finely divided solid carriers or both, and then, if necessary, shaping the product.

[0146] Compositions suitable for oral administration can be presented as discrete units such as capsules, cachets or tablets each containing a predetermined amount of the active ingredient; as a powder or granules; as a solution or a suspension in an aqueous or non-aqueous liquid; or as an oil-in-water liquid emulsion or a water-in-oil liquid emulsion. The active ingredient may also be administered as a bolus, electuary or paste. The active ingredient may also be administered as a buccal or sublingual formulation. Buccal or sublingual formulations may comprise an active ingredient in a matrix that releases the active ingredient for transport across the buccal and/or sublingual membranes. The buccal or sublingual formulation may further include a rate controlling matrix that releases the active compounds at a predetermined rate for transport across the buccal and/or sublingual membranes. The buccal or sublingual formulation may further include one or more compounds selected from the group consisting of (i) taste masking agents, (ii) enhancers, (iii) complexing agents, and mixtures thereof; and (iv) other pharmaceutically acceptable carriers and/or excipients. The enhancer may be a permeation enhancer.

[0147] A tablet is made by compression or molding, optionally with one or more accessory ingredients. Compressed tablets can be prepared by compressing in a suitable machine the active ingredient in a free-flowing form such as a powder or granules, optionally mixed with a binder, lubricant, inert diluent, preservative, surface active or dispersing agent. Molded tablets may be made by molding in a suitable machine a mixture of the powdered active ingredient moistened with an inert liquid diluent. The tablets can optionally be coated or scored and optionally are formulated so as to provide slow or controlled release of the active ingredient therefrom.

### V. Non-Invasive Detection of Intestinal Inflammation

[0148] The IL-23R inhibitors of the present invention may be used for detection, assessment and diagnosis of intestinal inflammation by microPET imaging, wherein the peptide inhibitor is labeled with a chelating group or a detectable label, as part of a non-invasive diagnostic procedure. In certain embodiments, an IL-23R inhibitor of the present invention is conjugated with a bifunctional chelator. In certain embodiments, an IL-23R inhibitor of the present invention is radiolabeled. The labeled an IL-23R inhibitor is then administered to a subject orally or rectally. In certain embodiments, the an IL-23R inhibitor is included in drinking water. Following uptake of the an IL-23R inhibitor, microPET imaging may be used to visualize inflammation throughout the subject's bowels and digestive track.

### VI. Methods of Treatments and/or Uses

[0149] The present invention relates to methods for treating a subject afflicted with a condition or indication associated with IL-23 or IL-23R (e.g., activation of the IL-23/IL-23R signaling pathway), wherein the method comprises administering to the subject an IL-23R inhibitor disclosed herein. A In one aspect, the present invention relates to a method for treating a subject afflicted with a condition or indication characterized by inappropriate, deregulated, or increased IL-23 or IL-23R activity or signaling, comprising administering to the individual a peptide inhibitor of the present invention in an amount sufficient to inhibit (partially or fully) binding of IL-23 to an IL-23R in the subject. The inhibition of IL-23 binding to IL-23R may occur in particular organs or tissues of the subject, e.g., the stomach, small intestine, large intestine/colon, intestinal mucosa, lamina propria, Peyer's Patches, mesenteric lymph nodes, or lymphatic ducts.

[0150] The present invention relates to methods comprising providing a peptide inhibitor described herein to a subject in need thereof. The subject in need thereof may be a subject that has been diagnosed with or has been determined to be at risk of developing a disease or disorder associated with IL-23/IL-23R. The subject may be a mammal. The subject may be, in particular, a human.

[0151] The disease or disorder to be treated by treatment with an IL-23R inhibitor of the present invention may be inflammatory, autoimmune inflammation diseases and/or related disorders, such as multiple sclerosis, asthma, rheumatoid arthritis, inflammation of the gut, inflammatory bowel diseases (IBDs), juvenile IBD, adolescent IBD, Crohn's disease, ulcerative colitis, sarcoidosis, Systemic Lupus Erythematosus, ankylosing spondylitis (axial spondyloarthritis), psoriatic arthritis, or psoriasis. In particular, the disease or disorder may be psoriasis (e.g., plaque psoriasis, guttate psoriasis, inverse psoriasis, pustular psoriasis, Palmo-Plantar Pustulosis, psoriasis vulgaris, or erythrodermic psoriasis), atopic dermatitis, acne ectopica, ulcerative colitis, Crohn's disease, Celiac disease (nontropical Sprue), enteropathy associated with seronegative arthropathies, microscopic colitis, collagenous colitis, eosinophilic gastroenteritis/esophagitis, colitis associated with radio- or chemo-therapy, colitis associated with disorders of innate immunity as in leukocyte adhesion deficiency-1, chronic granulomatous disease, glycogen storage disease type 1b, Hermansky-Pudlak syndrome, Chediak-Higashi syndrome, Wiskott-Aldrich Syndrome, pouchitis, pouchitis resulting after proctocolectomy and ilcoanal anastomosis, gastrointestinal cancer, pancreatitis, insulin-dependent diabetes mellitus, mastitis, cholecystitis, cholangitis, primary biliary cirrhosis, viral-associated enteropathy, pericholangitis, chronic bronchitis, chronic sinusitis, asthma, uveitis, or graft versus host disease.

[0152] The present invention relates to a method or use of an IL-23R inhibitor for treating an inflammatory disease in a subject that includes administering to the subject a therapeutically effective amount of an IL-23R inhibitor of the present invention or pharmaceutically acceptable solvate or salt thereof, or a composition disclosed herein comprising an IL-23 inhibitor of the present invention.

[0153] In some aspects, the present invention provides a method of treating an inflammatory disease or autoimmune inflammation diseases and/or related disorders in a subject that includes administering to the subject a therapeutically effective amount of an IL-23R inhibitor of the present invention or pharmaceutically acceptable solvate or salt thereof, or a composition of the present invention.

[0154] Suitable inflammatory, autoimmune inflammation diseases and/or related disorders for treatment with a compound or pharmaceutically acceptable salt thereof, or a composition of the present invention, may include, but are not limited to inflammatory bowel disease (IBD), Crohn's disease (CD), ulcerative colitis (UC), psoriasis (PsO), or psoriatic arthritis (PsA) and the like. The inflammatory disease to be treated may be inflammatory bowel disease (IBD), Crohn's disease, or ulcerative colitis. The inflammatory disease to be treated may be selected from psoriasis, or psoriatic arthritis. The inflammatory disease to be treated may be psoriasis The inflammatory disease to be treated may be psoriatic arthritis. The inflammatory disease to be treated may be IBD.

[0155] The present invention relates to methods for treating an inflammatory, autoimmune inflammation diseases and/or related disorders in a subject in need thereof, comprising administering to the subject an IL-23R inhibitor disclosed herein (e.g., a peptide inhibitor or the IL-23R of Formula (I) to Formula (X) or any of Tables 1A-11. The inflammatory disease may be IBD, Crohn's disease, or ulcerative colitis. In aspect, the IBD may be ulcerative colitis. In an aspect, the IBD may be Crohn's disease. In an aspect, the inflammatory disease may be psoriasis (PsO), or psoriatic arthritis (PsA).

[0156] The present invention relates to methods for treating an inflammatory, autoimmune inflammation diseases and/or related disorders in a subject in need thereof, comprising administering to the subject an IL-23R inhibitor of Formulas I to X) or any of Tables 1A-1I.

[0157] The inflammatory, autoimmune inflammation diseases and/or related disorders may be IBD, Crohn's disease, or ulcerative colitis. In aspect, the IBD may be ulcerative colitis. In an aspect, the IBD may be Crohn's disease. In an aspect, the inflammatory disease may be psoriasis (PsO), or psoriatic arthritis (PsA).

[0158] The present invention relates to methods for treating an inflammatory, autoimmune inflammation diseases and/or related disorders in a subject in need thereof, comprising administering to the subject an IL-23R inhibitor of Formulas I to X) or any of Tables 1A-11. The inflammatory disease may be IBD, Crohn's disease, or ulcerative colitis. In aspect, the IBD may be ulcerative colitis. In an aspect, the IBD may be Crohn's disease. In an aspect, the inflammatory disease may be psoriasis (PsO), or psoriatic arthritis (PsA).

[0159] The present invention relates to methods of inhibiting IL-23 binding to an IL-23R on a cell, comprising contacting the IL-23R with a peptide inhibitor of the receptor disclosed herein. The cell may be a mammalian cell. The method may be performed in vitro or in vivo. Inhibition of binding may be determined by a variety of routine experimental methods and assays known in the art.

[0160] The present invention relates to a method of selectively inhibiting IL-23 or IL-23R signaling (or the binding of IL-23 to IL-23R) in a subject (e.g., in a subject in need thereof), comprising providing to the subject a peptide inhibitor of the IL-23R described herein. The present invention includes and provides a method of selectively inhibiting IL-23 or IL-23R signaling (or the binding of IL-23 to IL-23R) in the GI tract of a subject (e.g., a subject in need thereof), comprising providing to the subject a peptide inhibitor of the IL-23R of the present invention by oral administration. The exposure of GI tissues (e.g., small intestine or colon) to the administered peptide inhibitor may be at least 10-fold, at least 20-fold, at least 50-fold, or at least 100-fold greater than the exposure (level) in the blood. In particular embodiments, the present invention includes a method of selectively inhibiting IL23 or IL23R signaling (or the binding of IL23 to IL23R) in the GI tract of a subject (e.g., a subject in need thereof), comprising providing to the subject a peptide inhibitor, wherein the peptide inhibitor does not block the interaction between IL-6 and IL-6R or antagonize the IL-12 signaling pathway. In a further related embodiment, the present invention includes a method of inhibiting GI inflammation and/or neutrophil infiltration to the GI, comprising providing to a subject in need thereof a peptide inhibitor of the present invention. In some embodiments, methods of the present invention comprise providing a peptide inhibitor of the present invention (i.e., a first therapeutic agent) to a subject (e.g., a subject in need thereof) in combination with a second therapeutic agent. In certain embodiments, the second therapeutic agent is provided to the subject before and/or simultaneously with and/or after the peptide inhibitor is administered to the subject. In particular embodiments, the second therapeutic agent is an anti-inflammatory agent. In certain embodiments, the second therapeutic agent is a non-steroidal anti-inflammatory drug, steroid, or immune modulating agent. In certain embodiments, the method comprises administering to the subject a third therapeutic agent. In certain embodiments, the second therapeutic agent is an antibody that binds IL-23 or IL-23R.

[0161] The present invention relates to methods of inhibiting IL-23 signaling by a cell, comprising contacting the IL-23R with a peptide inhibitor described herein. In certain embodiments, the cell is a mammalian cell. In particular embodiments, the method is performed in vitro or in vivo. In particular embodiments, the inhibition of IL-23 signaling may be determined by measuring changes in phospho-STAT3 levels in the cell.

[0162] In any of the foregoing methods, IL-23R inhibitor administration to a subject may be conducted orally, but other routes of administration are not excluded. Other routes of administration include, but are not limited to, parenteral, subcutaneous, intravenous, intramuscular, intraperitoneal, transdermal, topical, buccal or ocular routes. Dosages of a peptide inhibitor or the IL-23R described herein (e.g., a compound of Formulas I to X or any of Tables 1A-1I), or salt or solvate thereof to be administered to a subject may be determined by a person of skill in the art taking into account the the disease or condition being treated including its severity, and factors including the age weight, sex, and the like. Exemplary dose ranges include, but are not limited to, from about 1 mg to about 1000 mg, or from about 1 mg to about 500 mg, from about 1 mg to about 100 mg, from about 10 mg to about 50 mg, from about 20 mg to about 40 mg, or from about 20 mg to about 30 mg. A dose range of a peptide inhibitor or the IL-23R described herein may be from about 600 mg to about 1000 mg. A dose range of a peptide inhibitor or the IL-23R described herein may be from about 300 mg to about 600 mg. A dose range of a peptide inhibitor or the IL-23R described herein may be from about 5 mg to about 300 mg. A dose range of a peptide inhibitor or the IL-23R described herein may be from about 25 mg to about 150 mg. A dose range of a peptide inhibitor or the IL-23R described herein may be from about 25 mg to about 100 mg. A dose range of a peptide inhibitor or the IL-23R described herein may be present in a dose range of from about 1 mg to about 100 mg. A dose range of a peptide inhibitor or the IL-23R described herein may be present in a dose range of from about 20 mg to about 40 mg. A dose range of a peptide inhibitor or the IL-23R described herein may be present in a dose range of from about 20 mg to about 30 mg.

### ASPECTS OF THE PRESENT INVENTION

[0163] The following aspects illustrate and are not intended to limit scope of the present invention. Instead, these aspects provide guidance to any skilled artisan on how to prepare and use compounds, compositions and methods taught by the present invention, where such skilled artisans will appreciate that modifications may be made without departing from the spirit and scope of the invention.
[0164] 1. A peptide inhibitor of an interleukin-23 receptor, which comprises an amino acid sequence of Formula I

R1-X3-X4-X5-X6-X7-X8-X9-X10-X11-X12-X13-X14-X15-X16-R2
[0165] wherein:
[0166] R1 is hydrogen, CH₃C(O)—, EtC(O)—, MeSO2, AzCO, BHCO, FPrpTriazoleMeCO, SMSBCO, Biotin, BiotinPEG2PEG2CO, DAGSuc;
[0167] X3 is dR, dK, PEG6, gEPEG6, R, K, or absent;
[0168] X4 is Pen, aMeC, hC, or C;
[0169] X5 is A, N, Q, N-MeAsn, L, Asn(4C13_2N15), I, K (PEG2PEG2Biotin);
[0170] X6 is T, MeThr, V, K, Dbu, Dpr, or A;
[0171] X7 is W7Me, W, W(4F7Me), 7MeW, 7PhW, 7EtW, 7FW, 7ClW, 5BrW, 7(3NAcPh)W′
[0172] X8 is KAc, Q, NMeGln, A, Cit, dK(Ac), dQ, dNMeGln, dA, or dCit;
[0173] X9 is Pen, aMeC, hC, or C;
[0174] X10 is F4OMe, AEF, F, F4Me, F4Ad, Nal, AEF(Boc), 4PipPhe, AEF(Ac), Y, 4OMeF, 4AmF, D(Pip), Tzl(mPEG3), 3FTyr, Y(OTzl), Y(OTzl(mPEG3)), Tzl, Tzl(PEG3OH);
[0175] X11 is Nal, Quin_3, Coumarin(7OMe), 2Nal, 3Quin;
[0176] X12 is aMeK, THP, Spiral_Pip_Ac, Spiral_Pip, MeK, aMeLeu, aMeL, aMeK(Boc)
[0177] X13 is KAc, K, dK(Ac), or dK;
[0178] X14 is A, N, L, N-MeAsn, MeLeu, Asn(4C13_2N15), I;
[0179] X15 is 3Pya, bAla, Thiozolidine, H, dL, N, A, F, aMePhe, Aib, dK, h, 3MeH, 1MeH, tetraFPhe, bMePhe(SR), 5PyrimidAla, v, dR, homoF, Y, y, F(CF3), Y(CHF2), THP, or absent;
[0180] X16 is MeGly, dMeGly, dL, MeLeu, dMeLeu, N-MeNle, dN-MeNle, y, paf, maf, d3Pya, bAla, dbAla, P, dP, N(3AmBenzyl)Gly, N(4AmBenzyl)Gly, 4(R)HydroxyPro, 4(S)AminoPro, 5(R)diMePro, or absent;
[0181] R2 is —OH, —NH₂, —HN(C₁-C₄ alkyl), —N(C₁-C₄ alkyl)₂, MeNH, CONHMe; and
[0182] wherein the inhibitor of an interleukin-23 receptor is cyclized by a disulfide bond between penicillamine, cysteine, homocysteine, or alpha methylcysteine residues at positions X4 and X9.
[0183] 2. The inhibitor of an interleukin-23 receptor of aspect 1, wherein X4 and X9 are Pen or hC residues that are selected independently.
[0184] 3. The inhibitor of an interleukin-23 receptor of any of aspects 1 to 2, wherein X15 is 3Pya.
[0185] 4. The inhibitor of an interleukin-23 receptor of any of aspects 1 to 3, wherein X11 is 2Nal or 3Quin.
[0186] 5. The inhibitor of an interleukin-23 receptor of any of aspects 1 to 4, wherein X7 is 7MeW, or W.
[0187] 6. The inhibitor of an interleukin-23 receptor of any of aspects 1 to 5, wherein:
   [0188] R1 is hydrogen or CH₃C(O)—; and
   [0189] R2 is —NH₂, MeNH, or CONHMe.
[0190] 7. A peptide inhibitor of an interleukin-23 receptor, which comprises an amino acid sequence of Formula II

R1-X3-Abu-X5-T-X7-X8-X9-AEF-X11-X12-X13-X14-X15-X16-X17-R2 (II)
[0191] wherein:
   [0192] R1 is hydrogen, or CH₃C(O)—;
   [0193] X3 is dR, R, or absent;
   [0194] X4 is Abu;
   [0195] X5 is Q, N, or T;
   [0196] X6 is T;
   [0197] X7 is W or 7MeW;
   [0198] X8 is Q, K, KAc, dQ, dK, or dK(Ac);
   [0199] X9 is Pen, C, hC, or aMeC;
   [0200] X10 is AEF;
   [0201] X11 is 2Nal, or Nal;
   [0202] X12 is THP, Acvc, or Achx;
   [0203] X13 is E, KAc, aMeE, Q, AIB, Achx, aMedE, dE, dK(Ac), or dQ;
   [0204] X14 is N or S;
   [0205] X15 is H, bAla, N, 3Pya, F, aMeF, aMeW, 1Nal, 4AmPhe, 2Nal, aMeFPhe, aMePhe, 3,4diFPhe, DY02, 5FW, or absent;
   [0206] X16 is MeGly, AIB, or absent;
   [0207] X17 is aMeK or absent;
   [0208] R2 is —OH, —NH₂, —HN(C₁-C₄ alkyl), —N(C₁-C₄ alkyl)₂; and
   [0209] wherein the inhibitor of an interleukin-23 receptor is cyclized by a thioether bond between the Abu residue at X4 and a cysteine, homocysteine, or alpha methylcysteine residue at X9.
[0210] 8. The inhibitor of an interleukin-23 receptor of aspect 7, wherein X9 is aMeC.
[0211] 9. The inhibitor of an interleukin-23 receptor of any of aspects 7 to 8, wherein X5 is N.
[0212] 10. The inhibitor of an interleukin-23 receptor of any of aspects 7 to 8, wherein X8 is KAc.
[0213] 11. The inhibitor of an interleukin-23 receptor of any of aspects 7 to 10, wherein X11 is Nal.
[0214] 12. The inhibitor of an interleukin-23 receptor of any of aspects 7 to 11, wherein X15 is 3Pya.
[0215] 13. The inhibitor of an interleukin-23 receptor of any of aspects 1 to 12, wherein:
   [0216] R1 is CH₃C(O)—; and
   [0217] R2 is —NH₂.
[0218] 14. A peptide inhibitor of an interleukin-23 receptor, which comprises an amino acid sequence of Formula III

R1-X3-X4-X5-X6-X7-X8-X9-X10-X11-X12-X13-X14-X15-X16-R2 (III)
[0219] wherein:
[0220] R1 is hydrogen, CH₃C(O)—, FPrpTriazoleMeCO, NH₂, EtCO, AzCO, or BHCO;
[0221] X3 is dR, R, K, or dK;
[0222] X4 is Pen, Abu, AIB, aMeC, C, hC, Ala, 4RAminoPro, or 4SAminoPro;
[0223] X5 is N, D, or E;
[0224] X6 is T, Hyp, or 3OHPro;
[0225] X7 is 7MeW, W, 3Pya, A, 7PyrW, or 7(3NAcPh)W;
[0226] X8 is KAc, or dKAc;
[0227] X9 is Pen, C, S5H, AIB, D, E, hC, aMeC;
[0228] X10 is AEF, AEF(EtCO), AEF(BH), AEF(Ac), bMeAEF(2S3R*), bMeAEF(2S3S*), Y, or A;
[0229] X11 is 2Nal, A, Nal, or W;
[0230] X12 is THP;
[0231] X13 is E, KAc, S5H, dE, dKAc, or R5H;
[0232] X14 is N, S, 3Pya;
[0233] X15 is 3Pya, H, bAla, v, dR, hF, PAF, F, THP, 1, 4Pya, oAMPhe, 3MeH, D3Pya, N, 5MePyridinAla, 5AmPyridinAla, 3QuinolAla, 6OH3Pya, A
[0234] X16 is MeGly;
[0235] R2 is —NH₂—HN(C₁-C₄ alkyl), —N(C₁-C₄ alkyl)₂ or —OH; and
[0236] wherein the inhibitor of an interleukin-23 receptor is cyclized by a disulfide bond between penicillamine, cysteine, homocysteine, or alpha methylcysteine residues at positions X4 and X9; or
[0237] wherein the inhibitor of an interleukin-23 receptor is cyclized by a thioether bond between the Abu residue at X4 and a cysteine, homocysteine, or alpha methylcysteine residue at X9; or
[0238] wherein when X4 is 4RAminoPro or 4SAminoPro and X9 is E or D, the inhibitor of an interleukin-23 receptor is cyclized by an amide bond between X4 and X9;
[0239] or
[0240] wherein when X5 is D or E, and X10 comprises an AEF residue, the inhibitor of an interleukin-23 receptor is cyclized by an amide bond between X5 and X10;
[0241] or
[0242] wherein when X9 and X13 comprise S5H residues the inhibitor of an interleukin-23 receptor is cyclized by an aliphatic linkage between X9 and X13.
[0243] 15. The inhibitor of an interleukin-23 receptor of aspect 14, wherein:
   [0244] X4 is and X9 is selected independently from Pen, C, and aMeC and X9 is Abu and the peptide is cyclized by formation of a thioether linkage; or
   [0245] X4 and X9 are selected independently from Pen, C, hC, and aMeC, and the inhibitor is cyclized by a disulfide bond between amino acids at positions X4 and X9.
[0246] 16. The inhibitor of an interleukin-23 receptor of aspect 14, wherein X15 is 5MePyridinAla or 5AmPyridinAla.
[0247] 17. The inhibitor of an interleukin-23 receptor of any of aspects 14 to 16, wherein X3 is dR and X4 is Pen.
[0248] 18. The inhibitor of an interleukin-23 receptor of any of aspects 14 to 17, wherein X11 is 2Nal and X12 is THP.
[0249] 19. The inhibitor of an interleukin-23 receptor of any of aspects 14 to 18, wherein one or both of X5 and X14 are N.
[0250] 20. The inhibitor of an interleukin-23 receptor of any of aspects 14 to 19, wherein R1 is CH₃C(O)—.
[0251] 21. The inhibitor of an interleukin-23 receptor of any of aspects 14 to 20, wherein R2 is an —NH₂.
[0252] 22. A peptide inhibitor of an interleukin-23 receptor, which comprises an amino acid sequence of Formula IV

R1-X3-X4-X5-X6-X7-X8-X9-X10-X11-X12-X13-X14-X15-X16-R2 (IV)
[0253] wherein:
[0254] R1 is hydrogen, CH₃C(O)—, Ac_Morph, or MorphCO;
[0255] X3 is K(AcMorp), Kmorp, dK(AcMorp), or absent;
[0256] X4 is Pen, C, hC, or aMeC;
[0257] X5 is L, N, or nLeu;
[0258] X6 is T or L;
[0259] X7 is W or 7MeW;
[0260] X8 is KAc, K(AcMorph), K(IsoButyl_Ac), K(Butyl_Ac), K(Benzyl_Ac), KMorph, K, dKAc, dK(AcMorph), dK(IsoButyl_Ac), dK(Butyl_Ac), dK(Benzyl_Ac), dKMorph, or dK;
[0261] X9 is Pen, C, hC, or aMeC;
[0262] X10 is F4OMe, F, AEF, F4Ad, L, F4CN, or 4OMeF;
[0263] X11 is 2Nal or Nal;
[0264] X12 is L, THP, Spiral_Pip, aMeK, or aMeL;
[0265] X13 is L, dL, or nL (i.e., norleucine);
[0266] X14 is N or L;
[0267] X15 is 3Pya or absent;
[0268] X16 is MeGly or absent;
[0269] R2 is NH (2-(pyridin3-1)ethyl), —NH₂, —HN(C₁-C₄ alkyl), —N(C₁-C₄ alkyl)₂, or —OH; and
[0270] wherein the inhibitor of an interleukin-23 receptor is cyclized by a disulfide bond between penicillamine, cysteine, homocysteine, or alpha methylcysteine residues at positions X4 and X9.
[0271] 23. The inhibitor of an interleukin-23 receptor of aspect 22, wherein one or both of X4 and X9 are Pen.
[0272] 24. The inhibitor of an interleukin-23 receptor of any of aspects 22 to 23, wherein X3 is absent.
[0273] 25. The inhibitor of an interleukin-23 receptor of any of aspects 23 to 24, wherein X8 is KAc or K.
[0274] 26. The inhibitor of an interleukin-23 receptor of any of aspects 22 to 25, wherein X11 is 2Nal.
[0275] 27. The inhibitor of an interleukin-23 receptor of any of aspects 22 to 26, wherein X12 is aMeL or THP.
[0276] 28. The inhibitor of an interleukin-23 receptor of any of aspects 22 to 27, wherein:
   [0277] R1 is CH₃C(O)—; and
   [0278] R2 is —OH or —NH₂.
[0279] 29. A peptide inhibitor of an interleukin-23 receptor, which comprises an amino acid sequence of Formula V

R1-X3-X4-X5-X6-X7-X8-X9-X10-X11-THP-X13-X14-X15-R2 (V)
[0280] wherein:
[0281] R1 is hydrogen, or CH₃C(O), Propionic_acid, EtCO, PentCO, AzCO, MeSO2, NH₂, BHCO, FPrpTriazoleMeCO, (SulfoCy3), (SulfoCy3dPEG2), (SulfoCy3dPEG3), or SMSBCO;
[0282] X3 is dR, R, or absent;
[0283] X4 is Abu, Pen, C, hC, aMeC, aG, or Dpr;
[0284] X5 is Q or N;
[0285] X6 is T;
[0286] X7 is W, W7Me, 7MeW, bMeW (2S3R), bMeW (2S3S), 7FW, 7ClW, 5BrW, or 5MeW;
[0287] X8 is Q, K, KAc, Q, dK, or dKAc;
[0288] X9 is C, Pen, hC, aMeC, aG, E, or D;
[0289] X10 is AEF, F4OMe, F4Ad, Phe(4(2(Ac)aminoethoxy)), ac, LY02, AEF(Boc), 4PipPhe, AEF(BH), or AEF(SMSB);
[0290] X11 is 2Nal or Nal;
[0291] X12 is THP;
[0292] X13 is E, KAc, K, Q, aMeE, AIB, dE, dKAc, dK, dQ, aMedE, or Achx;
[0293] X14 is N;
[0294] X15 is H, bAla, N, F, aMePhe, aMeF, aMeW, 1Nal, 4AmPhe, 2Nal, aMeFPhe, 3,4diFPhe, DY02, 5FW, D(NBzl), D(NPh), D(NoAn), D(NPip), D(NPyr), D(NpAn), D(NmAn), D(N4Pyz), D(N5In), D(NPrAm), dH, D(NEtNH2), 3MeH, 1MeH, tetraFPhe, bMePhe(SR), 5PyrimidAla, 3OHPhe, 4PyridinAla, 3Pya, 4TriazolAla, bMePhe(2S3S), 2AmTyr, bMeH(2S3S*), or 5MeH;
[0295] R2 is —NH₂, —OH, —HN(C₁-C₄ alkyl), —N(C₁-C₄ alkyl)₂, or CONHMe; and
[0296] wherein the inhibitor of an interleukin-23 receptor is cyclized by a disulfide bond between penicillamine, cysteine, homocysteine, or alpha methylcysteine residues at positions X4 and X9; or
[0297] wherein the inhibitor of an interleukin-23 receptor is cyclized by a thioether bond between the Abu residue at X4 and a cysteine, homocysteine, or alpha methylcysteine residue at X9; or
[0298] wherein when X4 is Dpr and X9 is E or D, the inhibitor of an interleukin-23 receptor is cyclized by an amide bond between X4 and X9; or
[0299] wherein when X4 and X9 are aG, the inhibitor of an interleukin-23 receptor is cyclized by an aliphatic bond (generated from a Ring Closing Metathesis “RCM” reaction) between X4 and X9.
[0300] 30. The inhibitor of an interleukin-23 receptor of aspect 29, wherein X4 and X9 are aG, and the inhibitor of an interleukin-23 receptor is cyclized by an aliphatic bond between X4 and X9.
[0301] 31. The inhibitor of an interleukin-23 receptor of aspect 29, wherein X4 is Dpr and X9 is E or D, and the inhibitor is cyclized by an amide bond between X4 and X9.
[0302] 32. The inhibitor of an interleukin-23 receptor of aspect 29, wherein the inhibitor is cyclized by a thioether bond between the Abu residue at X4 and a cysteine, homocysteine, or alpha methylcysteine residue at X9.
[0303] 33. The inhibitor of an interleukin-23 receptor of aspect 29, wherein X4 and X9 are selected independently from Pen, C, hC, and aMeC and the inhibitor is cyclized by a disulfide bond between amino acids at positions X4 and X9.
[0304] 34. The inhibitor of an interleukin-23 receptor of any of aspects 29 to 33, wherein X3 is absent.
[0305] 35. The inhibitor of an interleukin-23 receptor of any of aspects 29 to 34, wherein X7 is W or W7Me.
[0306] 36. The inhibitor of an interleukin-23 receptor of any of aspects 29 to 35, wherein one or both of X10 is AEF.
[0307] 37. The inhibitor of an interleukin-23 receptor of any of aspects 29 to 36, wherein X15 is F, aMePhe, D(NPh), bMePhe(SR), 3OHPhe, tetraFPhe, or bMePhe(2S3S).
[0308] 38. The inhibitor of an interleukin-23 receptor of any of aspects 29 to 37, wherein x15 is H, dH, 3MeH, 1MeH, 3MeH, bMeH(2S3S*), or 5MeH.
[0309] 39. The inhibitor of an interleukin-23 receptor of any of aspects 29 to 38, wherein R¹ is CH₃C(O)—.
[0310] 40. The inhibitor of an interleukin-23 receptor of any of aspects 29 to 39, wherein R2 is NH₂.
[0311] 41. A peptide inhibitor of an interleukin-23 receptor, which comprises an amino acid sequence of Formula VI

R1-X4-X5-X6-X7-X8-X9-X10-X11-X12-X13-X14-X15-X16-R2 (VI)
[0312] wherein:
[0313] R1 is hydrogen, or CH3C(O);
[0314] X4 is Pen, Abu, C, hC, dPen, dC, or aMeC;
[0315] X5 is L, N, Q. T, dN or absent;
[0316] X6 is T, L, dT, or absent;
[0317] X7 is W7Me, W(4F7Me), 7PhW, 7MeW, 7EtW, W, 7BrW, 7(2ClPh)W, 7(4CF3Ph)W, 7(3CF3TAZP)W, 7(4NAcPh)W, 7(3NAcPh)W, 7(40CF3Ph)W, 7(40MePh)W, 7(4Paz)W, 7(7Imzpy)W, 7(6(1)7dMeNDAZ))W, 7(3UrPh)W, 7(5(Ina7Pyr))W, 7(4(CpCNPh))W, 7(6(2MeNDAZ))W, BT, D7MeW;
[0318] X8 is KAc, Q, K(Gly), dKAc, dQ, or dK(Gly);
[0319] X9 is Pen, C, hC, aMeC, or dPen;
[0320] X10 is AEF, F4Ad, F4OMe, F4Me, Nal, F, Spiral_Pip, L, 4AmF, AEF(G), dY, or Y;
[0321] X11 is Nal, 3Quin, 2Nal, 2Quin, d2Nal, or W;
[0322] X12 is THP, aMeLeu, Acvc, aMeK, or Acpx, A;
[0323] X13 is E or dE;
[0324] X14 is N, L, or dN;
[0325] X15 is 3Pya, THP, N, H, dK, dL, dPaf, PAF, 3MeH, 3pya, or F;
[0326] X16 is MeGly, dK, K, or absent; and
[0327] R2 is —NH₂, —OH, —HN(C₁-C₄ alkyl), —N(C₁-C₄ alkyl)₂, or CONHMe; and
[0328] wherein the inhibitor of an interleukin-23 receptor is cyclized by a disulfide bond between a Pen, C, hC, dPen, dC, or aMeC at X4 and a Pen, C, hC, aMeC, or dPen, residue at X9; or
[0329] wherein the inhibitor of an interleukin-23 receptor is cyclized by a thioether bond between the Abu residue at X4 and a Pen, C, hC, or aMeC residue at X9.
[0330] 42. The inhibitor of an interleukin-23 receptor of aspect 41, wherein the inhibitor is cyclized by a disulfide bond between a Pen, Abu, C, hC, dPen, dC, or aMeC at X4 and a Pen, C, hC, aMeC, or dPen X9 the inhibitor is cyclized by a thioether bond between the Abu residue at X4 and a Pen, C, hC, or aMeC residue at X9.
[0331] 43. The inhibitor of an interleukin-23 receptor of aspect 41, wherein the inhibitor is cyclized by a disulfide bond between a Pen, C, hC, dPen, dC, or aMeC residue at X4 and a Pen, C, hC, aMeC, or dPen residue at X9.
[0332] 44. The inhibitor of an interleukin-23 receptor of aspect 43, wherein X4 is Pen or dPen.
[0333] 45. The inhibitor of an interleukin-23 receptor of aspect 43 or aspect 44, wherein X9 is Pen or dPen.
[0334] 46. The inhibitor of an interleukin-23 receptor of any of aspects 43 to 45, wherein X5 is N or dN.
[0335] 47. The inhibitor of an interleukin-23 receptor of any of aspects 43 to 46, wherein X6 is T or dT.
[0336] 48. The inhibitor of an interleukin-23 receptor of any of aspects 43 to 47, wherein X7 is W, 7MeW, or d7MeW.
[0337] 49. The inhibitor of an interleukin-23 receptor of any of aspects 43 to 48, wherein X8 is KAc or dKAc.
[0338] 50. The inhibitor of an interleukin-23 receptor of any of aspects 43 to 49, wherein X10 is AEF(G) or dY.
[0339] 51. The inhibitor of an interleukin-23 receptor of any of aspects 43 to 50, wherein X10 is AEF, F4Ad, F4OMe, F4Me, Nal, F, Spiral_Pip, L, 4AmF, or Y.
[0340] 52. The inhibitor of an interleukin-23 receptor of any of aspects 43 to 51, wherein X11 is 2Nal or d2Nal.
[0341] 53. The inhibitor of an interleukin-23 receptor of any of aspects 43 to 52, wherein X12 is THP.
[0342] 54. The inhibitor of an interleukin-23 receptor of any of aspects 43 to 53, wherein X14 is N or dN.
[0343] 55. The inhibitor of an interleukin-23 receptor of any of aspects 43 to 54, wherein X15 is 3Pya, or 3pya.
[0344] 56. The inhibitor of an interleukin-23 receptor of any of aspects 43 to 54, wherein X15 is THP, N, H, dK, dL, dPaf, PAF, 3MeH, or F.
[0345] 57. The inhibitor of an interleukin-23 receptor of any of aspects 43 to 56, wherein X16 is MeGly.
[0346] 58. The inhibitor of an interleukin-23 receptor of any of aspects 43 to 56, wherein R2 is NH₂.
[0347] 59. A peptide inhibitor of an interleukin-23 receptor, which comprises an amino acid sequence of Formula VII

R1-X5-X6-X7-X8-X9-X10-X11-X12-X13-X14-X15-X16-R2 (VII)
[0348] wherein:
[0349] R1 is 7Ahp, 6Ahx, 8Aoc, or 5Ava;
[0350] X5 is N or absent;
[0351] X6 is T or absent;
[0352] X7 is 7MeW or absent;
[0353] X8 is KAc or absent;
[0354] X9 is Pen, Aib, or absent;
[0355] X10 is AEF or absent;
[0356] X11 is 2Nal;
[0357] X12 is THP;
[0358] X13 is E, dE, hE, hdE, D, dD, or Q;
[0359] X14 is N, D, or E;
[0360] X15 is 3Pya or N;
[0361] X16 is MeGly; and
[0362] R2 is absent, —NH₂—HN(C₁-C₄ alkyl), —N(C₁-C₄ alkyl) 2 or —OH; and
[0363] wherein the inhibitor of an interleukin-23 receptor is cyclized by a bond between a residue at R1 and X13, R1 and X14, or between a residue at R1 and X9.
[0364] 60. A peptide inhibitor of an interleukin-23 receptor, which comprises an amino acid sequence of Formula VIII

R1-X3-X4-X5-X6-X7-X8-X9-X10-X11-X12-X13-X14 (VIII)
[0365] wherein:
[0366] R1 is hydrogen, CH₃C(O)—, FPrpTriazoleMeCO, NH₂, EtCO, AzCO, or BHCO;
[0367] X3 is dR, R, or absent;
[0368] X4 is Pen, Abu, C, or aMeC;
[0369] X5 is Q or N;
[0370] X6 is T;
[0371] X7 is W or 7MeW;
[0372] X8 is Q, dQ, KAc, dKAc;
[0373] X9 is Pen, Abu, C, or aMeC;
[0374] X10 is AEF or absent;
[0375] X11 is 2Nal or absent;
[0376] X12 is THP or absent;
[0377] X13 is E, dE, D, dD, KAc, dKAc, or absent; and
[0378] X14 is N, THP, bAla, N, Pyr, or absent;
[0379] R2 is absent or —NH₂—HN(C₁-C₄ alkyl), —N(C₁-C₄ alkyl) 2 or —OH; and
[0380] wherein the inhibitor of an interleukin-23 receptor is cyclized by a disulfide bond between a residue at X4 and a residue at X9.
[0381] 61. A peptide inhibitor of an interleukin-23 receptor, which comprises an amino acid sequence of Formula IX

R1-X6-X7-X8-X9-X10-X11-X12-X13-X14-X15-X16-R2 (IX)
[0382] wherein:
[0383] R1 is hydrogen, CH₃C(O)—, NH₂, or EtCO;
[0384] X6 is absent, 3OHPro, AIB, or T;
[0385] X7 is W, 7MeW, or absent;
[0386] X8 is KAc, dKAc, AIB, or absent;
[0387] X9 is S5H, S5Me, aMeS5H, aMeK, aMeK (N3), E, K, or aMePra;
[0388] X10 is AEF, 4OMeF, or F;
[0389] X11 is 2Nal;
[0390] X12 is THP, aMeK, or aMeL;
[0391] X13 is S5H, S5Me, aMeS5H, aMeK, aMeK (N3), E, dE, D, dD, K, dK, or aMePra;
[0392] X14 is N or L;
[0393] X15 is 3Pya or absent;
[0394] X16 is MeGly, N(iBu)Gly, N(Cyclohexyl)Gly, N(3AmBenzyl)Gly, or N(3AmBenzyl)Gly; and
[0395] R2 is absent, —NH₂—HN(C₁-C₄ alkyl), —N(C₁-C₄ alkyl)₂ or —OH; and
[0396] wherein the inhibitor of an interleukin-23 receptor is cyclized by a bond between a residue at X9 and a residue at X13.
[0397] 62. A peptide inhibitor of an interleukin-23 receptor, which comprises an amino acid sequence of Formula X

R1-X6-X7-X8-X9-X10-X11-X12-X13-X14-X15-X16-R2 (X)
[0398] wherein:
[0399] R1 is hydrogen, CH₃C(O)—, NH₂, or EtCO;
[0400] X6 is AIB, 3OHPro, T, or absent;
[0401] X7 is W, 7MeW, or absent;
[0402] X8 is S5H, KAc, or absent;
[0403] X9 is AIB, S5H, A, or absent;
[0404] X10 is AEF, S5H, hLys, or 4OMeF;
[0405] X11 is 2Nal;
[0406] X12 is S5H, aMeK, S5Me, or THP;
[0407] X13 is KAc, S5H, E, Q, Pen, Abu, C, aMeC, dKAc, dE, dQ, dC, or aMedC;
[0408] X14 is N, hE, S5H, D, or N;
[0409] X15 is 3Pya;
[0410] X16 is MeGly;
[0411] R2 is absent, —NH₂—HN(C₁-C₄ alkyl), —N(C₁-C₄ alkyl)₂ or —OH; and
[0412] wherein the inhibitor of an interleukin-23 receptor is cyclized by a bond between a residue at X9 and a residue at X12, a bond between a residue at X9 and a residue at X13, a bond between a residue at X10 and a residue at X14, or a bond between a residue at X4 and a residue at X9.
[0413] 63. An inhibitor of an interleukin-23 receptor provided in any of Tables 1A to Table 1G.
[0414] 64. An inhibitor of an interleukin-23 receptor provided in Table 1H.
[0415] 65. An inhibitor of an interleukin-23 receptor provided in Table 1I.
[0416] 66. An inhibitor of an interleukin-23 receptor selected from compound 345, 469, 477, and 478.

[chemical structure]

[chemical structure]

[0417] 67. The peptide inhibitor of an interleukin-23 receptor of any of aspects 1-66, wherein D amino acids are present or substituted for a corresponding L amino acid only at
   [0418] (i) one or more of positions X3, X5, X6, X8, X13 and X16, and optionally one of positions X1-X2, X4, X7, X9 to X12, X14-X18 present in the inhibitor; or
   [0419] (ii) one or more of positions X3, X8 and X13, and optionally at one of positions X1-X2, X4-X7, X9 to X12, X14-X18 present in the inhibitor.
[0420] 68. The peptide inhibitor of an interleukin-23 receptor of any of aspects 1-66, wherein D amino acids are present are present or substituted for a corresponding L amino acid only at
   [0421] (i) X3, and optionally at one of positions X1-X2, X4-X18 present in the inhibitor; or
   [0422] (ii) one of positions X3, and X8, and optionally one of positions X1-X2, X4-X7, X9-X18 present in the inhibitor.
[0423] 69. The peptide inhibitor of an interleukin-23 receptor of any of aspects 1-66, wherein the inhibitor comprises amino acids of the D-isomeric form, or substituted with a D amino acid in place of the corresponding L amino acid, at only one or two of positions X1 to X18 appearing in the IL-23R inhibitors set forth herein.
[0424] 70. The peptide inhibitor of an interleukin-23 receptor of any of aspects 1-66, wherein the inhibitor comprises amino acids of the D-isomeric form, or substituted with a D amino acid in place of the corresponding L amino acid, at only three or four of positions X1 to X18 appearing in the IL-23R inhibitors set forth herein.
[0425] 71. The peptide inhibitor of an interleukin-23 receptor of any of aspects 1-66, wherein the inhibitor comprises amino acids of the D-isomeric form, or substituted with a D amino acid in place of the corresponding L amino acid, at only five or six of positions X1 to X18 appearing in the IL-23R inhibitors set forth herein.
[0426] 72. The peptide inhibitor of an interleukin-23 receptor of any preceding aspect wherein the interleukin-23 receptor is a human interleukin receptor.
[0427] 73. A pharmaceutical composition which comprises:
   [0428] (i) peptide inhibitor of an interleukin-23 receptor or pharmaceutically acceptable salt, solvate, or form thereof according to any one of aspects 1-58, and
   [0429] (ii) a pharmaceutically acceptable carrier, excipient, or diluent.
[0430] 74. A pharmaceutical composition which comprises:
   [0431] (i) peptide inhibitor of an interleukin-23 receptor or pharmaceutically acceptable salt, solvate, or form thereof according to any one of aspects 59-66, and
   [0432] (ii) a pharmaceutically acceptable carrier, excipient, or diluent.
[0433] 75. A pharmaceutical composition which comprises:
   [0434] (i) peptide inhibitor of an interleukin-23 receptor or pharmaceutically acceptable salt, solvate, or form thereof according to aspect 63 or 66: and
   [0435] (ii) a pharmaceutically acceptable carrier, excipient, or diluent.
[0436] 76. A pharmaceutical composition which comprises:
   [0437] (i) peptide inhibitor of an interleukin-23 receptor or pharmaceutically acceptable salt, solvate, or form thereof according to aspect 63: and
   [0438] (ii) a pharmaceutically acceptable carrier, excipient, or diluent.
[0439] 77. A pharmaceutical composition which comprises:
   [0440] (i) peptide inhibitor of an interleukin-23 receptor or pharmaceutically acceptable salt, solvate, or form thereof according to aspect 64: and
   [0441] (ii) a pharmaceutically acceptable carrier, excipient, or diluent.
[0442] 78. A pharmaceutical composition which comprises:
   [0443] (i) peptide inhibitor of an interleukin-23 receptor or pharmaceutically acceptable salt, solvate, or form thereof according to aspect 65: and
   [0444] (ii) a pharmaceutically acceptable carrier, excipient, or diluent.
[0445] 79. A pharmaceutical composition which comprises:
   [0446] (i) peptide inhibitor of an interleukin-23 receptor or pharmaceutically acceptable salt, solvate, or form thereof according to aspect 66: and
   [0447] (ii) a pharmaceutically acceptable carrier, excipient, or diluent.
[0448] 80. A pharmaceutical composition which comprises:
   [0449] (i) peptide inhibitor of an interleukin-23 receptor or pharmaceutically acceptable salt, solvate, or form thereof according to aspect 67: and
   [0450] (ii) a pharmaceutically acceptable carrier, excipient, or diluent.
[0451] 81. A pharmaceutical composition which comprises:
   [0452] (i) peptide inhibitor of an interleukin-23 receptor or pharmaceutically acceptable salt, solvate, or form thereof according to aspect 68 to 72: and
   [0453] (ii) a pharmaceutically acceptable carrier, excipient, or diluent.
[0454] 82. The use of a peptide inhibitor of an interleukin-23 receptor according to any of aspects 1-73 for the preparation of a medicament.
[0455] 83. The use of a peptide inhibitor of an interleukin-23 receptor according to any of aspects 1-73, or a pharmaceutical composition according to any of aspects 74-82, for the preparation of a medicament for the treatment of inflammatory, autoimmune inflammation diseases and/or related disorders.
[0456] 84. The use of a peptide inhibitor of an interleukin-23 receptor according to any of aspects 1-73, or a pharmaceutical composition according to any of aspects 74-82, for the preparation of a medicament for the treatment of inflammatory, autoimmune inflammation diseases and/or related disorders including, but not limited to: multiple sclerosis, asthma, rheumatoid arthritis, inflammation of the gut, inflammatory bowel diseases (IBDs), juvenile IBD, adolescent IBD, Crohn's disease, ulcerative colitis, Celiac disease (nontropical Sprue), microscopic colitis, collagenous colitis, eosinophilic gastroenteritis/esophagitis, colitis associated with radio- or chemo-therapy, colitis associated with disorders of innate immunity as in leukocyte adhesion deficiency-1, sarcoidosis, Systemic Lupus Erythematosus, ankylosing spondylitis (axial spondyloarthritis), psoriatic arthritis, psoriasis (e.g., plaque psoriasis, guttate psoriasis, inverse psoriasis, pustular psoriasis, Palmo-Plantar Pustulosis, psoriasis vulgaris, or erythrodermic psoriasis), atopic dermatitis, acne ectopica, enteropathy associated with seronegative arthropathies, chronic granulomatous disease, glycogen storage disease type 1b, Hermansky-Pudlak syndrome, Chediak-Higashi syndrome, Wiskott-Aldrich Syndrome, pouchitis, pouchitis resulting after proctocolectomy and ilcoanal anastomosis, gastrointestinal cancer, pancreatitis, insulin-dependent diabetes mellitus, mastitis, cholecystitis, cholangitis, primary biliary cirrhosis, viral-associated enteropathy, pericholangitis, chronic bronchitis, chronic sinusitis, asthma, uveitis, or graft versus host disease.
[0457] 85. The use of aspect 84, wherein the diseases or disorders are selected from Inflammatory Bowel Disease (IBD), Ulcerative colitis (UC), Crohn's Disease (CD), psoriasis (PsO) or psoriatic arthritis (PsA).
[0458] 86. A method for treating a disease or disorder associated with Interleukin 23 (IL-23)/Interleukin 23 Receptor (IL-23R), which comprises administering:
   [0459] (i) an effective amount of a peptide inhibitor of an interleukin-23 receptor, or a pharmaceutically acceptable salt, solvate, or form thereof according to any one of aspects 1-73;
   [0460] or
   [0461] (ii) a pharmaceutical composition according to any one of aspects 74 to 82, respectively to a patient in need thereof.
[0462] 87. The method of aspect 82, wherein the disease or disorder is associated with autoimmune inflammation.
[0463] 88. The method of aspect 82, wherein the disease or disorder is associated with multiple sclerosis, asthma, rheumatoid arthritis, inflammation of the gut, inflammatory bowel diseases (IBDs), juvenile IBD, adolescent IBD, Crohn's disease, ulcerative colitis, Celiac disease (nontropical Sprue), microscopic colitis, collagenous colitis, eosinophilic gastroenteritis/esophagitis, colitis associated with radio- or chemo-therapy, colitis associated with disorders of innate immunity as in leukocyte adhesion deficiency-1, sarcoidosis, Systemic Lupus Erythematosus, ankylosing spondylitis (axial spondyloarthritis), psoriatic arthritis, psoriasis (e.g., plaque psoriasis, guttate psoriasis, inverse psoriasis, pustular psoriasis, Palmo-Plantar Pustulosis, psoriasis vulgaris, or erythrodermic psoriasis), atopic dermatitis, acne ectopica, enteropathy associated with seronegative arthropathies, chronic granulomatous disease, glycogen storage disease type 1b, Hermansky-Pudlak syndrome, Chediak-Higashi syndrome, Wiskott-Aldrich Syndrome, pouchitis, pouchitis resulting after proctocolectomy and ileoanal anastomosis, gastrointestinal cancer, pancreatitis, insulin-dependent diabetes mellitus, mastitis, cholecystitis, cholangitis, primary biliary cirrhosis, viral-associated enteropathy, pericholangitis, chronic bronchitis, chronic sinusitis, asthma, uveitis, or graft versus host disease.
[0464] 89. The method of aspect 82, wherein the disease or disorder is associated with Ulcerative colitis (UC), Crohn's Disease (CD), psoriasis (PsO), or psoriatic arthritis (PsA).
[0465] 90. The method of aspect 82, wherein the disease or disorder is Ulcerative colitis (UC).
[0466] 91. The method of aspect 82, wherein the disease or disorder is Crohn's Disease (CD).
[0467] 92. The method of aspect 82, wherein the disease or disorder is psoriasis (PsO).
[0468] 93. The method of aspect 82, wherein the disease or disorder is psoriasis psoriatic arthritis (PsA).
[0469] 94. A kit which comprises a peptide inhibitor of an interleukin-23 receptor of an of aspects 1-72, or a pharmaceutical composition according to any of aspects 73-82, and instructions for the use of the inhibitor of an interleukin-23 receptor or pharmaceutical composition.
[0470] 95. The kit of aspect 94, wherein the instructions are directed to the treatment of an inflammatory disease or disorder.
[0471] 96. The kit of aspect 95, wherein the disease is inflammatory bowel disease (IBD), Crohn's disease (CD), ulcerative colitis (UC), psoriasis (PsO), and psoriatic arthritis (PsA).

### EXAMPLES

[0472] The following examples illustrate the invention. These examples are not intended to limit the scope of the present invention, but rather to provide guidance to the skilled artisan to prepare and use the compounds, compositions, and methods of the present invention. While particular aspects of the present invention are described, the skilled artisan will appreciate that various changes and modifications can be made without departing from the spirit and scope of the invention.

[0473] Some abbreviations useful in describing the invention are defined below in the following Table 2A to Table 2D.

TABLE 2A
Amino Acid Abbreviations

| Abbreviation | Definition | Smiles |
|---|---|---|
| dR, arg, or r | D-Arginine | |
| dK, (D)Lys, (D)-Lys, | D-lysine | |
| lys, or k | | |
| 5Apa | 5AminoPentanoicAcid | |
| 2-Nal or 2Nal | [chemical structure] | O═C([C@H](Cc1cc2ccccc2cc1)N[R])[R] |
| | C₁₃H₁₁NOR₂ | |
| 3MeH | 3-methyl-L-histidine | Cn1cncc1C[C@H](N[R])C([R])═O |
| 3Pya, 3Pal, 3-(2- pyridyl)-alanine | [chemical structure] | O═C([C@H](Cc1cnccc1)N[R])[R] |
| THP, 4- aminotetrahydro- 2H-pyran- 4-carboxylic acid | [chemical structure] | O═C(C1(CCOCC1)N[R])[R] |
| | 4-amino-4-carboxy-tetrahydropyran | |
| 7PhW, 7PhTrp or W(7-Ph) | [chemical structure] | O═C([C@H](Cc1c[nH]c2c1cccc2-c1cccc1)N[R])[R] |
| | 7-phenyl-L-tryptophan | |
| 7MeW, 7(MeW), 7MeTrp, 7-methyl-L- tryptophan | [chemical structure] | Cc1cccc2c1[nH]cc2C[C@@H](C([R])═O)N[R] |
| | 7-methyl-L-tryptophan | |
| Abu | 2-aminobutyric acid | C[C@@H](C═O)N |
| AEF, Phe(4-(2- aminoethoxy)), or F(4- 2ae) | [chemical structure] | NCCOc1ccc(C[C@@H](C([R])═O)N[R])cc1 |
| | 4-(2-aminoethoxy)-L-phenylalanine | |
| Ahp, 7Ahp, 7AHP, or | 7-aminoheptanoic acid | O═C([R])CCCCCCN[R] |
| 7AHP(2) | | |
| Ahx or 6Ahx, 6Ahx, | 6-aminohexanoic acid | O═C(CCCCCN[R])[R] |
| 6Ahx(2), | | |
| 6-aminohexanoic acid | | |
| aMeF, aMePhe, or aMe-Phe | [chemical structure] | C[C@](Cc(cc1)ccc1F)(C([R])═O)N[R] |
| | alpha-methyl L-phenylalinine | |
| aMeK, aMeLys, or | alpha-methyl L-lysine | |
| aMe-Lys | | |
| Arg or R | L-arginine | |
| dR, arg, r or (D)Arg | D-arginine | |
| Asn or N | L-asparagine | |
| Ava, 5Ava(2), or 5Ava | [chemical structure] | O═C(CCCCN[R])[R] |
| | 5-Aminovaleric Acid | |
| bAla, b-ALA, beta- Alanine, bA | [chemical structure] | O═C(CCN[R])[R] |
| | beta-alanine | |
| Bis-amino-PEG2 | 1,2-bis(2-aminoethoxy)ethane | |
| Cys or C | L-cysteine | |
| Dbu, Dab, (S)-2,4- diaminobutanoic acid, or DAB | [chemical structure] | NCC[C@@H](C(O)═O)N |
| | L-2,4-diaminobutyric acid | |
| Dap, Dap, DAP, Dpr or (S)-2,3- diaminopropanoic acid | [chemical structure] | NC[C@@H](C([R])═O)N[R] |
| | L-2,3-diaminopropionic acid | |
| dDab, D(Dab), dDpr, | D-2,4-diaminobutyric acid | NC[C@H](C([R])═O)N[R] |
| (R)-2,3- | | |
| diaminopropanoic acid | | |
| dDap, D(Dap), dDap, dap, dDbu, (R)-2,3- diaminopropanoic acid | [chemical structure] | NC[C@H](C([R])═O)N[R] |
| | D-2,3-diaminopropionic acid | |
| Fmoc-2Nal | 2-((((9H-fluoren-9- | |
| | yl)methoxy)carbonyl)amino)-3- | |
| | (naphthalen-2-yl)propanoic acid | |
| Fmoc-3Pya | (S)-2-((((9H-fluoren-9-yl)methoxy)carbonyl) | |
| | amino)-4-(pyridin-3-yl)butanoic acid | |
| Fmoc-7MeW | (S)-2-((((9H-fluoren-9- | |
| | yl)methoxy)carbonyl)amino)-3- | |
| | (7-methyl-1H-indol-3- | |
| | yl)propanoic acid | |
| Fmoc-AEF | (S)-2-((((9H-fluoren-9- | |
| | yl)methoxy)carbonyl)amino)-3- | |
| | (4-(2-((tert- | |
| | butoxycarbonyl)amino)ethoxy) | |
| | phenyl)propanoic acid | |
| Fmoc-aMePhe | (((9H-fluoren-9- | |
| | yl)methoxy)carbonyl)- | |
| | alphamethyl-L-phenylalanine | |
| Fmoc-arg or Fmoc-r | N-alpha-(9- | |
| | fluorenylmethyloxycarbonyl)-N′-2,2,4,6,7- | |
| | pentamethyldihydrobenzofuran- | |
| | 5-sulfonyl-D-arginine | |
| Fmoc-Asn or Fmoc-N | N²-(((9H-fluoren-9- | |
| | yl)methoxy)carbonyl)-N4-trityl- | |
| | L-asparagine | |
| Fmoc-Dap(DDe) | N2-(Fmoc)-N6-(1-(4,4- | |
| | dimethyl-3,5- | |
| | dioxocyclohexylidene)ethyl)-L- | |
| | Dap | |
| Fmoc-DDe-Lys(Fmoc)- | N6-(((9H-fluoren-9- | |
| OH | yl)methoxy)carbonyl)-N2-(1- | |
| | (4,4-dimethyl-3,5- | |
| | dioxocyclohexylidene)ethyl)-L- | |
| | lysine | |
| Fmoc-Glu or Fmoc-E | (S)-2-((((9H-fluoren-9- | |
| | yl)methoxy)carbonyl)amino)-5- | |
| | (tert-butoxy)-2-methyl-5- | |
| | oxopentanoic acid | |
| Fmoc-Lys(Ac) or | N2-(((9H-fluoren-9- | |
| Fmoc-K(Ac) | yl)methoxy)carbonyl)-N6- | |
| | acetyl-L-lysine | |
| Fmoc-Lys(DDe) or | N2-(Fmoc)-N6-(1-(4,4- | |
| Fmoc-K(DDe) | dimethyl-3,5- | |
| | dioxocyclohexylidene)ethyl)-L- | |
| | lysine | |
| Fmoc-Lys(NMeAc) or | N2-(((9H-fluoren-9- | |
| Fmoc-K(NMeAc) | yl)methoxy)carbonyl)-N6- | |
| | acetyl-N6-methyl-L-lysine | |
| Fmoc-NMeLys(DDe) or | (9H-fluoren-9-yl)methyl (1-amino- | |
| Fmoc-NMeK(DDe) | 6-((1-(4,4-dimethyl-3,5- | |
| | dioxocyclohexylidene)ethyl)amino)- | |
| | 1-oxohexan-2-yl)(methyl)carbamate | |
| Fmoc-Pen-Trt | (R)-2-((((9H-fluoren-9- | |
| | yl)methoxy)carbonyl)amino)-3- | |
| | methyl-3-(tritylthio)butanoic | |
| | acid | |
| Fmoc-Pro or | Fmoc-proline-OH | |
| Fmoc-P | | |
| Fmoc-pro or | Fmoc-D-proline-OH | |
| Fmoc-p | | |
| Fmoc-R5H | (R)-2-((((9H-fluoren-9- | |
| | yl)methoxy)carbonyl)amino)hept-6- | |
| | enoic acid | |
| Fmoc-Sar or Fmoc-Sarc | N-(((9H-fluoren-9- | |
| | yl)methoxy)carbonyl)-N- | |
| | methylglycine | |
| Fmoc-THP | 4-((((9H-fluoren-9- | |
| | yl)methoxy)carbonyl)amino) | |
| | tetrahydro-2H-pyran-4-carboxylic | |
| | acid | |
| Fmoc-Thr or Fmoc-T | N-(((9H-fluoren-9- | |
| | yl)methoxy)carbonyl)-O-(tert- | |
| | butyl)-L-threonine | |
| GABA, Gaba, Gaba(2), Gaba2, or 4Abu | [chemical structure] | O═C(CCCN[R])[R] |
| | 4-aminobutyric acid | |
| Glu or E | L-glutamic acid | |
| glu or e or D(Glu) | D-glutamic acid | |
| His or H | L-histidine | |
| Lys or K | L-lysine | |
| lys or k or (D)Lys | D-lysine | |
| hCys, hC | L-Homocysteine | C(CS)[C@@H](C(═O)O)N |
| KAc, Lys(Ac), K(Ac), | N-ϵ-acetyl-L-Lysine | CC(NCCCC[C@@H](C([R])═O)N[R])═O) |
| k(COMe), or K-Ac | N6-Acetyl-L-lysine | |
| MeK, N-MeLys, | N-methyl-Lysine | |
| NMeLys, NMeK, or MeLys | (2S)-2-amino-6- | |
| | (methylamino)hexanoic acid | |
| Pen | [chemical structure] | CC(C)([C@@H](C(O)═O)N)S |
| | L-penicillamine, 3-Mercapto-L-valine | |
| | (R)-2-Amino-3-mercapto-3- | |
| | methylbutanoic acid | |
| F4CONH2, Phe(4-CONH₂) or | 4-carbamoyl-L-phenylalanine | N[C@H](C([R])═O)Cc1ccc(C(N[R])═O)cc1 |
| Phe(4-CONH2) or Phe(Cmd) | (S)-2-amino-3-(4- | |
| or Phe_4Ad | carbamoylphenyl)propanoic acid | |
| F4OMe, Phe(4-OMe), | 4-methoxy-L-phenylalanine | N[C@@H](CC1═CC═C(OC)C═C1)C(O)═O |
| or Phe_4OMe | | |
| Quin, 3Quin, 3-Quin, 3QuinolAla, or 3QuinA | [chemical structure] | O═C([C@H](Cc1cc2ccccc2nc1)N[R])[R] |
| | (S)-2-amino-3-(quinolin-3- | |
| | yl)propanoic acid | |
| R5H, | (R)-2-aminopentanoic acid 5-diyl | |
| R6H, (R,E)-2-amino-8- | (R)-2-aminohexanoic acid 6-diyl | C═CCCCC[C@H](C([R])═O)N[R] |
| hydroxyoct-7-enoic acid | | |
| R7H, (R,E)-2-amino-9- | (R)-2-aminoheptanoic acid 7-diyl | C═CCCCCC[C@H](C([R])═O)N[R] |
| hydroxynon-8-enoic acid | | |
| S5H | (S)-2-aminopentanoic acid 5-diyl | C═CCCC[C@H](N[R])C([R])═O |
| meG, Sarc, MeGly, Sar, Sarc, MeGly, Sarcosine, Methylamino-Acetic Acid, N-methylglycine | [chemical structure] | CN(CC([R])═O[R] |
| | sarcosine or N-methylglycine | |
| Thr or T | L-threonine | |
| nFEtOH, Phe(4- | Fc1c(F)c([H])c(F)c(F)c1NC[C@@H](C([R])═O)N[R] | N[C@@H](C═O)c(cc1)ccc1OCC═O |
| OCH2COOH, or 2-amino-2-[4- | (R)-2-amino-2-(4-(carboxymethoxy)phenyl)acetic acid | |
| (carboxymethoxy)phenyl]acetic acid, | | |
| DappF6 | tetra-fluoro-phenylalanine | Fc1c(F)c([H])c(F)c(F)c1NC[C@@H](C([R])═O)N[R] |
| Dap(pF(6)) | | |

TABLE 2B
Abbreviations for Substituents, Reagents, and Solvents

| Abbreviation | Definition | Smiles |
|---|---|---|
| Ac or MeCO | acetyl | |
| ACN | acetonitrile | |
| Boc | tert-butoxy-carbonyl | |
| CONH₂ | carboxamide | |
| COOH | carboxylic Acid | |
| DCM | dichloromethane | |
| Dde | N-(1-(4,4-dimethyl-2,6- | |
| | dioxocyclohexylidene)ethyl | |
| DIC | N,N′-diisopropylcarbodiimide | |
| DMF | N,N-dimethylformamide | |
| Et₂O | di-ethylether | |
| FMOC or Fmoc | ((9H-fluoren-9-yl)methoxy)carbonyl | |
| HOAT or HOAt | 1-hydroxy-7-azabenzotriazole | |
| MeOH | methanol | |
| MTBE | methyl tert-butyl ether | |
| MW | microwave | |
| Oxyma | ethyl cyanohydroxyiminoacetate | |
| PEG2_DiAcid or PEG2DA | [chemical structure] | |
| | 3,3′-(ethane-1,2- | |
| | diylbis(oxy))dipropanecarbonyl | |
| pF | [chemical structure] | Fc1c(F)c([R])c(F)c(F)c1[R] |
| | 2,3,5,6-tetrafluorophen-1,4-diyl linker | |
| pFS | [chemical structure] | Fc(c(S[R])c(c(F)c1[R])F)c1F |
| | 2,3,5,6-tetrafluoro-4-mercaptophenol | |
| RT | room temperature | |
| TFA | trifluoroacetic acid | |
| TIPS | triisopropylsilane | |

TABLE 2C
Monomers

| # | Symbol/Name | Structure | Smiles |
|---|---|---|---|
| 1 | bMeW(2S3R) bMeW(2S,3R) | [chemical structure] | C[C@H](C1═CNC2═C1C═CC═C2) [C@H](N[R])C([R])═O |
| | | C₁₂H₁₂N₂OR₂ | |
| 2 | bMeW(2S3S), bMeW(2S,3S) | [chemical structure] | C[C@@H](C1═CNC2═C1C═CC═C2) [C@H](N[R])C([R])═O |
| | | C₁₂H₁₂N₂OR₂ | |
| 3 | 6OH2Nal | [chemical structure] | [R]C([C@H]CC1═CC═C(C═C(O) C═C2)C2═C1)N[R])═O |
| | | (S)-2-amino-3-(6-hydroxynaphthalen-2-yl)propanoic acid | |
| 4 | NMe7MeW | [chemical structure] | [R]C([C@@H](N[R])CC1═CN(C) C2═C1C═CC═C2C)═O |
| | | C₁₃H₁₄N₂OR₂ | |
| 5 | 7(4Paz)W | [chemical structure] | [R]C([C@@H](N[R]) CC1═CNC2═C1C═CC═C2C3═CNN═ C3)═O |
| | | C₁₄H₁₂N₄OR₂ | |
| 6 | 7(7(124TAZP))W | [chemical structure] | [R]C([C@@H](N[R]) CC1═CNC2═C1C═CC═C2C3═CC4═ NC═NN4C═C3)═O |
| | | C₁₇H₁₃N₅OR₂ | |
| 7 | 7(3UrPh)W | [chemical structure] | [R]C([C@@H](N[R]) CC1═CNC2═C1C═CC═C2C3═ CC(NC(N4)═O)═C4C═C3)═O |
| | | C₁₈H₁₄N₄O₂R₂ | |
| 8 | 7(7Imzpy)W | C₁₈H₁₄N₄OR₂ | [R]C([C@@H](N[R]) |
| | | | CC1═CNC2═C1C═ |
| | | | CC═C2C3═CC4═NC═CN4C═C3)═O] |
| 9 | 7(4OMePh)W | [chemical structure] | [R]C([C@@H](N[R]) CC1═CNC2═C1C═ CC═C2C3═CC═C(OC)C═C3)═O |
| | | C₁₈H₁₆N₂O₂R₂ | |
| 10 | 7(3(6AzaInd1Me))W | [chemical structure] | [R]C([C@@H](N[R]) CC1═CNC2═C1C═ CC═C2C3═CN(C) C4═C3C═CN═C4)═O |
| | | C₁₉H₁₆N₄OR₂ | |
| 11 | 7(6(2MeNDAZ))W | [chemical structure] | [R]C([C@@H](N[R]) CC1═CNC2═C1C═CC═ C2C3═CC4═NN(C)C═C4C═C3)═O |
| | | C₁₉H₁₆N₄OR₂ | |
| 12 | NMebAla | [chemical structure] | CN(C)CCC═O |
| | | C₅H₁₁NO | |
| 13 | AcMorp, Ethyl- morpholino | [chemical structure] | CN1CCOCC1 |
| | | C₅H₁₁NO | |
| 14 | dOrN, D-Orn D-Ornithine | [chemical structure] | NCCC[C@H](C(O)═O)N |
| | | C₅H₁₂N₂O | |
| 15 | 3Hyp, 3-Hydroxy- L-proline | [chemical structure] | OC1[C@@H](C═O)NCC1 |
| | | C₅H₉NO₂ | |
| 16 | aMaE aMeGlu, alpha- methyl glutamic acid | [chemical structure] | C[C@](CCC(O)═O)(C([R])═O)N[R] C[C@](CCC(O)═O)(C═O)N |
| | | C₆H₁₁NO₂ | |
| 17 | hGlu, (S)-2- aminohexanedioic acid | [chemical structure] | N[C@@H](CCCC═O) C═OOC(CCC[C@@H](C([R])═O) N[R])═O |
| | | C₆H₁₁NO₂ | |
| 18 | CON(NMePip) | [chemical structure] | CN(CC1)CCN1C═O |
| | | C₆H₁₂N₂O | |
| 19 | -CODiFPip, CO(DiFPip) | [chemical structure] | O═CN(CC1)CCC1(F)F |
| | | C₆H₉F₂NO | |
| 20 | CO(OAZBO) | [chemical structure] | CC(N1C2COCC1C2)═O |
| | | C₈H₁₃NO₂ | |
| 21 | Me1Pya, (S)-3-(2- amino-2- carboxyethyl)-1- methylpyridin- 1-ium | [chemical structure] | C[n+]1cccc(C[C@@H](C═O)N)c1 |
| | | C₉H₁₃N₂O⁺ | |
| 22 | DappF6, tetra-fluoro- phenylalanine | [chemical structure] | N[C@@H](CNc(c(F)c(c(S)c1F)F) c1F)C═O |
| | | C₉H₈F₄N₂O | |
| 23 | bMePhe(2S,3R) bMePhe(SR), bMePhe(2S,3R) | [chemical structure] | C[C@@H]([C@H](C([R])═O)N[R]) c1ccccc1 |
| | | C₁₀H₁₁NOR₂ | |
| 24 | N4AmBenzylGly, N(4AmBenzyl)Gly | [chemical structure] | NC(c1ccc(CNCC═O)cc1)═O |
| | | C₁₀H₁₂N₂O₂ | |
| 25 | -Dec, 1,10- Decanedioic Acid | [chemical structure] | OC(CCCCCCCCCC═O)═O |
| | | C₁₀H₁₈O₃ | |
| 26 | 2OH3Pyrimid5Ala | [chemical structure] | CC(C)(C)Oc1ncc(C[C@@H] (C([R])═O)N[R])cn1 |
| | | C₁₁H₁₅N₃O₂R₂ | |
| 27 | KacMorph, K(AcMorph), KAcMorph, L- Lysine(ac- Morpholino | [chemical structure] | N[C@@H] (CCCCNC(CN1CCOCC1) ═O)C═O |
| | | C₁₂H₂₃N₃O₃ | |
| 28 | 6OH2Nal | [chemical structure] | N[C@@H](Cc1cc2ccccc2cc1) C═ON[C@@H] (Cc1cc2ccccc2cc1) C═OOc1ccc(cc(C[C@@H] (C([R])═O)N[R])cc2)c2c1 |
| | | C₁₃H₁₃NO | |
| 29 | DabNMecarn, Dab(NMecarn) | [chemical structure] | CN(CC[C@@H] (C═O)N)C(CCC(N[C@H] (CC═O)C[N+](C)(C)C)═O)═O CN(CC[C@@H] (C═O)N)C(CCC(N[C@H] (CC═O)C[N+](C)(C)C)═O)═O CN(CC[C@@H] (C═O)N)C(CCC(N[C@H] (CC(O)═O)C[N+](C)(C)C)═O)═O |
| | | C₁₆H₃₁N₄O₄⁺ | |
| 30 | DabNMeCarn, Dab(NMeCarn) | [chemical structure] | CN(CC[C@@H](C═O) N)C(CCC(N[C@@H] (CC(O)═O)C[N+](C)(C)C)═O)═O |
| | | C₁₆H₃₁N₄O₅⁺ | |
| 31 | F(4TzlTMA4) | [chemical structure] | C[N+](C)(C) CCCCc1cn(-c2ccc(C[C@@H] (C([R])═O)N[R])cc2)nn1 |
| | | C₁₈H₂₆N₅OR₂⁺ | |
| 32 | NMeK(d), NMeKdCar | [chemical structure] | CN([C@@H](CCCCNC(CCC(N[C@H] (CC(O)═O)C[N+] (C)(C)C)═O)═O)C([R])═O)[R] |
| | | C₁₈H₃₃N₄O₅R₂⁺ | |
| 33 | 7(5(Ina7Pyr))W | [chemical structure] | [R]C([C@@H](N[R]) CC1═CNC2═C1C═CC═ C2C3═CN═C(N(C)CC4)C4═C3)═O |
| | | C₁₉H₁₈N₄OR₂ | |
| 34 | F(4TzlTMA5) | [chemical structure] | C[N+](C)(C)CCCCCc1cn (-c2ccc(C[C@@H] (C([R])═O)N[R])cc2)nn1 |
| | | C₁₉H₂₈N₅OR₂⁺ | |
| 35 | CF3COF3CO | [chemical structure] | O═C(C(F)(F)F)[R] |
| | | C₂F₃OR | |
| 36 | CF3Propylamide | [chemical structure] | O═C(CC(F)(F)F)[R] |
| | | C₃H₂F₃OR | |
| 37 | C(1*) (*pure but configuration unknown) | [chemical structure] | O═C(C([C@H](CS[R])N[R])[R] |
| | | C₃H₄NOSR₃ | |
| 38 | bAla, b-ALA, beta- Alanine, bA | [chemical structure] | O═C(CCN[R])[R] |
| | | C₃H₅NOR₂ | |
| 39 | CON(Me)2 | [chemical structure] | CN(C)C([R])═O |
| | | C₃H₆NOR | |
| 40 | D(2) | [chemical structure] | O═C(C[C@@H](C([R])═O)N[R])[R] |
| | | C₄H₄NO₂R₃ | |
| 41 | cPrCO | [chemical structure] | O═C(C1CC1)[R] |
| | | C₄H₅OR | |
| 42 | hS, hS, , Hse, L- homoserine, homoSm, or homoSer | [chemical structure] | OCC[C@@H](C([R])═O)N[R] |
| | | C₄H₇NO₂R₂ | |
| 43 | T, dThr, dT | [chemical structure] | C[C@H]([C@H](C([R])═O)N[R])O |
| | | C₄H₇NO₂R₂ | |
| 44 | 4sb, 4SB | [chemical structure] | O═C([R])CCCS(═O)(N[R])═O |
| | | C₄H₇NO₃SR₂ | |
| 45 | Aib, AIB, 2- Aminoisobutyric acid, Alpha- aminoisobutyric acid, (2-aminoalanine) | [chemical structure] | CC(C)(C([R])═O)N[R] |
| | | C₄H₇NOR₂ | |
| 46 | | | |
| 47 | NMebAla | [chemical structure] | CN(CCC([R])═O)[R] |
| | | C₄H₇NOR₂ | |
| 48 | aMeC | [chemical structure] | C[C@](CS)(C([R])═O)N[R] C[C@](CS)(C═O)N |
| | | C₄H₇NOSR₂ | |
| 49 | hC, hCys, homoC, or homoCys | [chemical structure] | O═C([C@H](CCS)N[R])[R] |
| | | C₄H₇NOSR₂ | |
| 50 | iPrCO | [chemical structure] | CC(C)C([R])═O |
| | | C₄H₇OR | |
| 51 | dDab, dab, (R)-2,4- diaminobutanoic acid | [chemical structure] | NCC[C@H](C([R])═O)N[R] |
| | | C₄H₈N₂OR₂ | |
| 52 | homobAla | [chemical structure] | C[C@@H](CC(O)═O)N[R] |
| | | C₄H₈NO₂R | |
| 53 | Bua, Butanoic acid | [chemical structure] | CCCC(O)═O |
| | | C₄H₈O₂ | |
| 54 | Orn, ORN, Ornithine | [chemical structure] | NCCC[C@@H](C([R])═O)N[R] |
| | | C₅H₁₀N₂OR₂ | |
| 55 | | | |
| 56 | Orn, L-ornithine | [chemical structure] | NCCC[C@@H](C(O)═O)N |
| | | ₅H₁₂N₂O₂ | |
| 57 | 4diFPro | [chemical structure] | O═C([C@H](CC(C1)(F)F)N1[R]) [R]O═C[C@H](C1)NCC1(F)F |
| | | C₅H₅F₂NOR₂ | |
| 58 | prG, prG, Fmoc-L- propargyl-Gly-OH, Pra | [chemical structure] | C#CC[C@@H](C[R])═O)N[R] |
| | | C₅H₅NOR₂ | |
| 59 | 4TriazolAla | [chemical structure] | O═C([C@H](Cc1cnn[nH]1)N[R])[R] |
| | | C₅H₆N₄OR₂ | |
| 60 | Tzl | [chemical structure] | O═C([C@H](Cn1nncc1)N[R])[R] |
| | | C₅H₆N₄OR₂ | |
| 61 | PyE, PyE (S)-5- oxopyrrolidine- 2-carboxylic acid | [chemical structure] | O═C([C@H](CC1)NC1═O) [R]O═C[C@H](CC1)NC1═O |
| | | C₅H₆NO₂R | |
| 62 | E(2) | [chemical structure] | O═C(CC[C@@H](C([R])═O)N[R])[R] |
| | | C₅H₆NO₂R₃ | |
| 63 | Tetrazole | [chemical structure] | O═C([C@H](CCn1nncn1)N[R])[R] N[C@@H](CCn1ncn1)C═O |
| | | C₅H₇N₅OR₂ | |
| 64 | 3OHPro | [chemical structure] | OC(CC1)[C@@H](C([R])═O)N1[R] |
| | | C₅H₇NO₂R₂ | |
| 65 | 4(R)HydroxyPro | [chemical structure] | O[C@H](C[C@H]1C([R])═O)CN1[R] |
| | | C₅H₇NO₂R₂ | |
| 66 | Hyp | [chemical structure] | OC(C[C@H]1C([R])═O)CN1[R] |
| | | C₅H₇NO₂R₂ | |
| 67 | AllylGly | [chemical structure] | C═CC[C@@H](C([R])═O)N[R] |
| | | C₅H₇NOR₂ | |
| 68 | Dap(Ac) | [chemical structure] | CC(NC[C@@H](C([R])═O)N[R])═O |
| | | C₅H₈N₂O₂R₂ | |
| 69 | N(NMe), NNMe, NMeAsn | [chemical structure] | CNC(C[C@@H](C([R])═O)N[R])═O |
| | | C₅H₈N₂O₂R₂ | |
| 70 | aMeN, aMeAsn | [chemical structure] | C[C@](CC(N)═O)(C([R])═O)N[R] |
| | | C₅H₈N₂O₂R₂ | |
| 71 | 4(S)AminoPro | [chemical structure] | N[C@@H](C[C@H] 1C([R])═O)CN1[R] |
| | | C₅H₈N₂OR₂ | |
| 72 | CO(Morph) | [chemical structure] | O═C(N1CCOCC1)[R] |
| | | C₅H₈NO₂R | |
| 73 | -COMorph, CO(Morph) | [chemical structure] | O═CN1CCOCC1 |
| | | C₅H₉NO₂ | |
| 74 | | | |
| 75 | Nva | [chemical structure] | CCC[C@@H](C([R])═O)N[R] |
| | | C₅H₉NOR₂ | |
| 76 | dM, dMet, D- Methionine | [chemical structure] | CSCC[C@H](C([R])═O)N[R] |
| | | C₅H₉NOSR₂ | |
| 77 | dPen, pen | [chemical structure] | CC(C)([C@H](C([R])═O)N[R])S |
| | | C₅H₉NOSR₂ | |
| 78 | BuCO | [chemical structure] | CCCCC([R])═O |
| | | C₅H₉OR | |
| 79 | iBuCO | [chemical structure] | CC(C)CC([R])═OCC[C@H] (C)C([R])═O |
| | | C₅H₉OR | |
| 80 | tBuCO | [chemical structure] | CC(C)(C)C([R])═O |
| | | C₅H₉OR | |
| 81 | N(N(Me)2), NNMe2 | [chemical structure] | CN(C)C(C[C@@H] (C([R])═O)N[R])═O |
| | | C₆H₁₀N₂O₂R₂ | |
| 82 | MorphCO, 2- morpholinoacetic acid | [chemical structure] | O═C(CN1CCOCC1)[R] |
| | | C₆H₁₀NO₂R | |
| 83 | CON(NMePip) | [chemical structure] | CN(CC1)CCN1C([R])═O |
| | | C₆H₁₁N₂OR | |
| 84 | eK | [chemical structure] | O═C(O)[C@@H](N[R])CCCCN[R] |
| | | C₆H₁₁N₂OR₃ | |
| 85 | Cit, Citrulline | [chemical structure] | NC(NCCC[C@@H] (C([R])═ON[R])═ON[C@@H] (CCCNC(N)═O)C(O)═O |
| | | C₆H₁₁N₃O₂R₂ | |
| 86 | D(NEtNH2) | [chemical structure] | NCCNC(C[C@@H] (C([R])═O)N[R])═O |
| | | C₆H₁₁N₃O₂R₂ | |
| 87 | Aad, 2-Aminoadipic acid | [chemical structure] | N[C@@H](CCCC(O)═O)C(O)═O |
| | | C₆H₁₁NO₄ | |
| 88 | N(Isobutyl)Gly | [chemical structure] | CC(C)CN(CC([R])═O)[R] |
| | | C₆H₁₁NOR₂ | |
| 89 | PentCO | [chemical structure] | CCCCCC([R])═O |
| | | C₆H₁₁OR | |
| 90 | NMeQ, NMeGln, N- Methyl-Glutamine | [chemical structure] | CN[C@@H](CCC(N)═O)C(O)═O |
| | | C₆H₁₂N₂O₃ | |
| 91 | SP6 | [chemical structure] | C[N+](C)(CCN[R]) CC([R])═OC[N+](C)(CCN)CC═O |
| | | C₆H₁₃N₂OR₂⁺ | |
| 92 | 3IOxa4Ala | [chemical structure] | O═C([C@H](Cc1conc1)N[R])[R] |
| | | C₆H₆N₂O₂R₂ | |
| 93 | 3Oxa4Ala | [chemical structure] | O═C([C@H](Cc1cocn1)N[R])[R] |
| | | C₆H₆N₂O₂R₂ | |
| 94 | diFCpx | [chemical structure] | O═C([C@](CC1)(CC1(F)F)N[R])[R] |
| | | C₆H₇F₂NOR₂ | |
| 95 | aMePra | [chemical structure] | C[C@](CC#C)(C([R])═O)N[R] |
| | | C₆H₇NOR₂ | |
| 96 | CO(DiFPip) | [chemical structure] | O═C(N(CC1)CCC1(F)F)[R] |
| | | C₆H₈F₂NOR | |
| 97 | dab(COCH2(1*)) dab(COCH2)(1*) | [chemical structure] | O═C(C[R]) NCC[C@@H](C([R])═O)N[R] |
| | | C₆H₉N₂O₂R₃ | |
| 98 | Tetrazole(NMe) | [chemical structure] | Cn1nnc(CC[C@@H](C([R])═O)N[R])n1 |
| | | C₆H₉N₅OR₂ | |
| 99 | | | |
| 100 | dhE | [chemical structure] | OC(CCC[C@H](C([R])═O)N[R])═O |
| | | C₆H₉NO₃R₂ | |
| 101 | Acpx | [chemical structure] | O═C(C1(CCCC1)N[R])[R] NC1(CCCC1)C═O |
| | | C₆H₉NOR₂ | |
| 102 | aMeP, aMePro | [chemical structure] | C[C@](CCC1)(C([R])═O)N1[R] |
| | | C₆H₉NOR₂ | |
| 103 | D(N2AmIm) | [chemical structure] | O═C(C[C@@H] (C([R])═O)N[R])NCc1ncc[nH]1 |
| | | C₈H₁₀N₄O₂R₂ | |
| 104 | KTfa, K(Tfa), L-Lys(Tfa) | [chemical structure] | O═C([C@H] (CCCCNC(C(F)(F)F)═O)N[R])[R] |
| | | C₈H₁₁F₃N₂O₂R₂ | |
| 105 | E(OAll) | [chemical structure] | C═CCOC(CC[C@@H] (C([R])═O)N[R])═O |
| | | C₈H₁₁NO₃R₂ | |
| 106 | D(NPyr) | [chemical structure] | O═C(C[C@@H] (C([R])═O)N[R])NC1CNCC1 |
| | | C₈H₁₃N₃O₂R₂ | |
| 107 | Chg | [chemical structure] | O═C([C@H](C1CCCCC1)N[R])[R] |
| | | C₈H₁₃NOR₂ | |
| 108 | R5Me, aMeR5H | [chemical structure] | C[C@@](CCCC═C)(C([R])═O)N[R] |
| | | C₈H₁₃NOR₂ | |
| 109 | R6H, (R,E)- 2-amino- 8-hydroxyocty- 7-enoic acid | [chemical structure] | C═CCCCC[C@H] (C([R])═O)N[R]C═CCCCC)[C@H] (C═O)N |
| | | C₈H₁₃NOR₂ | |
| 110 | S5Me aMeS5H | [chemical structure] | C[C@](CCCC═C)(C([R])═O)N[R] |
| | | C₈H₁₃NOR₂ | |
| 111 | S6H | [chemical structure] | C═CCCCC[C@@H](C([R])═O)N[R] |
| | | C₈H₁₃NOR₂ | |
| 112 | KAc, K(Ac), K(COMe), K-Ac, N6-acetyl-L-Lysine | [chemical structure] | CC(NCCCC[C@@H] (C([R])═O)N[R])═O |
| | | C₈H₁₄N₂O₂R₂ | |
| 113 | Pip(NMe2) | [chemical structure] | C[N+](C)(CC1)CCC1(C([R])═O)N[R] |
| | | C₈H₁₅N₂OR₂⁺ | |
| 114 | K(Gly) | [chemical structure] | NCC(NCCCC[C@@H] (C([R])═O)N[R])═O |
| | | C₈H₁₅N₃O₂R₂ | |
| 115 | 8Aoc, 8Aoc(2) | [chemical structure] | O═C(CCCCCCCN[R])[R] |
| | | C₈H₁₅NOR₂ | |
| 116 | 2Benzyl | [chemical structure] | O═C(c1c(C[R])cccc1)[R] |
| | | C₈H₆OR₂ | |
| 117 | 6OH3Pya | [chemical structure] | Oc1ncc(C[C@@H] (C([R])═O)N[R])cc1 |
| | | C₈H₈N₂O₂R₂ | |
| 118 | 3Pya, 3Pal, 3-(2- pyridyl)-alanine | [chemical structure] | O═C([C@H](Cc1cnccc1)N[R])[R] |
| | | C₈H₈N₂OR₂ | |
| 119 | 4Pya, 4Pra, 4Pal, (S)-2-amino-3- (pyridin-4- yl)propanoic acid 4PyridinAla | [chemical structure] | O═C([C@H](Cc1ccncc1)N[R])[R] |
| | | C₈H₈N₂OR₂ | |
| 120 | dPal, dpal, d3Pya, 3pya, 3- pyridylalanine, (R)- 2-amino-3-(pyridin- 3-yl)propanoic acid | [chemical structure] | O═C([C@@H](Cc1cnccc1)N[R])[R] |
| | | C₈H₈N₂OR₂ | |
| 121 | 6MePyridazAla | [chemical structure] | Cc1cc(C[C@@H] (C([R])═O)N[R])cnn1 |
| | | C₈H₉N₃OR₂ | |
| 122 | 5MePyridinAla | [chemical structure] | Cc1cc(C[C@@H] (C([R])═O)N[R])cnc1 |
| | | C₉H₁₀N₂OR₂ | |
| 123 | J, Aph, 4- aminophenylalanine | [chemical structure] | Nc1ccc(C[C@@H](C[R])═O)N[R])cc1 |
| | | C₉H₁₀N₂OR₂ | |
| 124 | NMe3Pya | [chemical structure] | CN([C@@H](Cc1cnccc1) C([R])═O)[R]CN[C@@H] (Cc1cnccc1)C═O |
| | | C₉H₁₀N₂OR₂ | |
| 125 | SMSBCO | [chemical structure] | CS(NCc(cc1)ccc1C([R])═O)(═O)═O |
| | | C₉H₁₀NO₃SR | |
| 126 | Me3Pya | [chemical structure] | C[n+]1cccc(C[C@@H] (C([R])═O)N[R])c1 |
| | | C₉H₁₁N₂OR₂⁺ | |
| 127 | D(Pip), (S)-2-amino- 4-oxo-4- (piperidin-1- yl)butanoic acid | [chemical structure] | O═C(C[C@@H] (C([R])═O)N[R])N1CCCCC1 |
| | | C₉H₁₄N₂O₂R₂ | |
| 128 | D(NPip) | [chemical structure] | O═C(C[C@@H] (C([R])═O)N[R])NC1CCNCC1 |
| | | C₉H₁₅N₃O₂R₂ | |
| 129 | N(Cyclohexyl)Gly | [chemical structure] | O═C(CN(CC1CCCCC1)[R])[R] |
| | | C₉H₁₅NOR₂ | |
| 130 | R7H, (R,E)- 2-amino- 9-hydroxynon-8- enoic acid | [chemical structure] | C═CCCCCC[C@H] (C([R])═O)N[R]C═CCCCCC[C@H] (C═O)N |
| | | C₉H₁₅NOR₂ | |
| 131 | K(COEt) | [chemical structure] | CCC(NCCCC[C@@H] (C([R])═O)N[R])═O |
| | | C₉H₁₆N₂O₂R₂ | |
| 132 | K(NMeAc), KNMeAc | [chemical structure] | CC(N(C)CCCC[C@@H] (C([R])═O)N[R])═O |
| | | C₉H₁₆N₂O₂R₂ | |
| 133 | Q(NHtBu) | [chemical structure] | CC(C)(C)NC(CC[C@@H] (C([R])═O)N[R])═O |
| | | C₉H₁₆N₂O₂R₂ | |
| 134 | K(Me)3 | [chemical structure] | C[N+](C)(C)CCCC[C@@H] (C([R])═O)N[R] |
| | | C₉H₁₉N₂OR₂⁺ | |
| 135 | dK(Me)3, K(Me)3 | [chemical structure] | C[N+](C)(C)CCCC[C@H] (C([R])═O)N[R] |
| | | C₉H₁₉N₂OR₂⁺ | |
| 136 | 5cpaCO | [chemical structure] | C[N+](C)(C)CCCCCC([R])═O |
| | | C₉H₁₉NOR⁺ | |
| 137 | tetraFPhe | [chemical structure] | O═C([C@H](Cc(c(F)c(cc1F)F) c1F)N[R])[R] |
| | | C₉H₅F₄NOR₂ | |
| 138 | 5CF33Pya | [chemical structure] | O═C([C@H](Cc1cncc(C(F)(F)F)c1) N[R])[R]N[C@@H](Cc1cc(C(F)(F)F) cnc1)C═O |
| | | C₉H₇F₃N₂OR₂ | |
| 139 | 3,4diFPhe, 4diFPhe | [chemical structure] | O═C([C@H](Cc(cc1)cc(F)c1F)N[R])[R] |
| | | C₉H₇F₂NOR₂ | |
| 140 | F(4N3) | [chemical structure] | [N−]═[N+]═Nc1ccc(C[C@@H] (C([R])═O)N[R])cc1 |
| | | C₉H₈N₄OR₂ | |
| 141 | 3FTyr | [chemical structure] | Oc(ccc(C[C@@H](C([R])═O) N[R])c1)c1F |
| | | C₉H₈FNO₂R₂ | |
| 142 | 2BrPhe, 2BrF | [chemical structure] | O═C([C@H](Cc(cccc1)c1Br)N[R])[R] |
| | | C₉H₈BrNOR₂ | |
| 143 | 2FPHE, 2FPhe | [chemical structure] | O═C([C@H](Cc(cccc1)c1F)N[R])[R] |
| | | C₉H₈FNOR₂ | |
| 144 | 3FPHE, 3FPhe | [chemical structure] | O═C([C@H](Cc1cc(F)ccc1)N[R])[R] |
| | | C₉H₈FNOR₂ | |
| 145 | BHCO | [chemical structure] | Oc(ccc(CCC([R])═O)c1)c1I |
| | | C₉H₈IO₂R | |
| 146 | 5AmPyridinAla | [chemical structure] | NC(c1cc(C[C@@H] (C([R])═O)[R])cnc1)═O |
| | | C₉H₉N₃O₂R₂ | |
| 147 | mTYR, mY, mTyr | [chemical structure] | Oc1cccc(C[C@@H](C([R])═O)N[R])c1 |
| | | C₉H₉NO₂R₂ | |
| 148 | 6OHQuin | [chemical structure] | Oc1ccc(cc(C[C@@H] (C([R])═O)N[R])cc2)c2n1 |
| | | C₁₂H₁₀N₂O₂R₂ | |
| 149 | 4AmF, 4AmPhe | [chemical structure] | NC(c1ccc(C[C@@H] (C([R])═O)N[R])cc1)═ON[C@@H] (Cc(cc1)ccc1C(N)═O)C═O |
| | | C₁₀H₁₀N₂O₂R₂ | |
| 150 | AEF(NMe(2)) | [chemical structure] | CN(CCOc1ccc(C[C@@H] (C([R])═O)N[R])cc1)[R] |
| | | C₁₂H₁₅N₂O₂R₃ | |
| 151 | aMeY01 | [chemical structure] | C[C@](Cc(cc1)ccc1OC)(C([R])═O)N[R] |
| | | C₁₁H₁₃NO₂R₂ | |
| 152 | BiF | [chemical structure] | C[C@](Cc(cc1)ccc1-c1ccccc1) (C([R])═O)N[R] |
| | | C₁₆H₁₅NOR₂ | |
| 153 | hdKMe3, hk(Me)3 | [chemical structure] | C[N+](C)(C)CCCCC[C@H](C═O)N |
| | | C₁₀H₂₃N₂O⁺ | |
| 154 | Y(OTzl) | [chemical structure] | O═C([C@H](Cc(cc1)ccc1OCc1c[nH] nn1)N[R])[R] |
| | | C₁₂H₁₂N₄O₂R₂ | |
| 155 | 3CONH2F | [chemical structure] | NC(c1cccc(C[C@@H](C([R])═O) N[R])c1)═O |
| | | C₁₀H₁₀N₂O₂R₂ | |
| 156 | 4AmDF, 4AmDPhe | [chemical structure] | NC(c1ccc(C[C@H](C([R])═O) N[R])cc1)═O |
| | | C₁₀H₁₀N₂O₂R₂ | |
| 157 | 4AmF, 4AmPhe | [chemical structure] | NC(c1ccc(C[C@@H] (C([R])═O)N[R])cc1)═ON[C@@H] (Cc(cc1)ccc1C(N)═O)C═O |
| | | C₁₀H₁₀N₂O₂R₂ | |
| 158 | D(NPh) | [chemical structure] | O═C(C[C@@H] (C([R])═O)N[R])Nc1ccccc1 |
| | | C₁₀H₁₀N₂O₂R₂ | |
| 159 | N(3AmBenzyl)Gly | [chemical structure] | NC(c1cccc(CN(CC([R])═O)[R])c1)═O |
| | | C₁₀H₁₀N₂O₂R₂ | |
| 160 | N(4AmBenzyl)Gly | [chemical structure] | NC(c1ccc(CN(CC([R])═O)[R])cc1)═O |
| | | C₁₀H₁₀N₂O₂R₂ | |
| 161 | 2AmTyr | [chemical structure] | NC(c(cc(C[C@@H] (C([R])═O)N[R])cc1)c1O)═O |
| | | C₁₀H₁₀N₂O₃R₂ | |
| 152 | aMeFPhe | [chemical structure] | C[C@](Cc(cc1)ccc1F)(C([R])═O)N[R] |
| | | C₁₀H₁₀FNOR₂ | |
| 163 | D(NmAn) | [chemical structure] | Nc1cccc(NC(C[C@@H] (C([R])═O)N[R])═O)c1 |
| | | C₁₀H₁₁N₃O₂R₂ | |
| 164 | D(NoAn) | [chemical structure] | Nc(cccc1)c1NC(C[C@@H] (C([R])═O)N[R])═O |
| | | C₁₀H₁₁N₃O₂R₂ | |
| 165 | D(NpAn) | [chemical structure] | Nc(cc1)ccc1NC(C[C@@H] (C([R])═O)N[R])═O |
| | | C₁₀H₁₁N₃O₂R₂ | |
| 166 | 4MeOF | [chemical structure] | COc1ccc(C[C@@H](C([R])═O) N[R])cc1COc1ccc(C[C@@H] (C═O)N)cc1 |
| | | C₁₀H₁₁NO₂R₂ | |
| 167 | NMeDTyr, NMeDY, NMedTyr, NMedY, N-Methyl-D- tyrosine, dNMeTyr dNMeY | [chemical structure] | CN([C@H](Cc(cc1)ccc1O) C([R])═O)[R] |
| | | C₁₀H₁₁NO₂R₂ | |
| 168 | aMe3OHPhe | [chemical structure] | C[C@](Cc1cc(O)ccc1)(C([R])═O)N[R] |
| | | C₁₀H₁₁NO₂R₂ | |
| 169 | aMeY, aMeTyr | [chemical structure] | C[C@](Cc(cc1)ccc1O)(C([R])═O)N[R] |
| | | C₁₀H₁₁NO₂R₂ | |
| 170 | bMeDTyr(2R3S) bMeDTyr(2R,3S) | [chemical structure] | C[C@H]([C@H] (C([R])═O)N[R])c(cc1)ccc1O |
| | | C₁₀H₁₁NO₂R₂ | |
| 171 | 4MeF | [chemical structure] | Cc1ccc(C[C@@H](C([R])═O)N[R])cc1 |
| | | C₁₀H₁₁NOR₂ | |
| 172 | aMeF, aMeF alpha-methyl phenylalanine | [chemical structure] | C[C@](Cc1ccccc1)(C([R])═O)N[R] C[C@](Cc1ccccc1)(C═O)N |
| | | C₁₀H₁₁NOR₂ | |
| 173 | bMePhe | [chemical structure] | CC([C@@H](C([R])═O)N[R])c1ccccc1 |
| | | C₁₀H₁₁NOR₂ | |
| 174 | bMePhe(2S3S) bMePhe(2S,3S) | [chemical structure] | C[C@H]([C@@H](C([R])═O) N[R])c1ccccc1 |
| | | C₁₀H₁₁NOR₂ | |
| 175 | hF, hPhe, homoF, homoPhe | [chemical structure] | O═C([C@H](CCc1ccccc1)N[R])[R] |
| | | C₁₀H₁₁NOR₂ | |
| 176 | F4CONH2, 4-carbamoyl-L- phenylalanine | [chemical structure] | N[C@@H](Cc(cc1)ccc1C(N)═O)C═O |
| | | C₁₀H₁₂N₂O₂ | |
| 177 | Maf | [chemical structure] | NCc1cccc(C[C@@H] (C([R])═O)N[R])c1 |
| | | C₁₀H₁₂N₂OR₂ | |
| 178 | Paf | [chemical structure] | NCc1ccc(C[C@@H](C([R])═O)N[R]) ccc1NCc1ccc(C[C@@H](C═O)N)cc1 |
| | | C₁₀H₁₂N₂OR₂ | |
| 179 | dMaf, maf | [chemical structure] | NCc1cccc(C[C@H](C([R])═O)N[R])c1 |
| | | C₁₀H₁₂N₂OR₂ | |
| 180 | dPaf | [chemical structure] | NCc1ccc(C[C@H](C([R])═O)N[R])cc1 |
| | | C₁₀H₁₂N₂OR₂ | |
| 181 | oAMPhe | [chemical structure] | NCc1c(C[C@@H] (C([R])═O)N[R])cccc1 |
| | | C₁₀H₁₂N₂OR₂ | OC([C@@H](N[H]) |
| | | | CC1═CC═C(C═C1)NC(N)═N)═O |
| | F(G) | | |
| 182 | F(4G) | [chemical structure] | NC(N)═Nc1ccc(C[C@@H] (C([R])═O)N[R])cc1 |
| | | C₁₀H₁₂N₄OR₂ | |
| 183 | NMeDTyr | [chemical structure] | CN[C@H](Cc1ccccc1)C═O |
| | | C₁₀H₁₃NO | |
| 184 | dNMeTyr dNMeY, D-N-methyl tyrosine N-Methyl- D-tyrosine | [chemical structure] | CN[C@H](Cc(cc1)ccc1O)C═O |
| | | C₁₀H₁₃NO₂ | |
| 185 | biotin | [chemical structure] | O═C(CCCC[C@@H]([C@H] 1N2)SC[C@@H]1NC2═O)[R] |
| | | C₁₀H₁₅N₂O₂SR | |
| 186 | K(CO2allyl) | [chemical structure] | C═CCC(NCCCC[C@@H] (C([R])═O) N[R])═OC═CCOC(NCCCC[C@@H] (C([R])═O)N[R])═O |
| | | C₁₀H₁₆N₂O₂R₂ | |
| 187 | K(COcPr) | [chemical structure] | O═C([C@H](CCCCNC(C1CC1)═O) N[R])[R] |
| | | C₁₀H₁₆N₂O₂R₂ | |
| 188 | DAGSuc | [chemical structure] | OC[C@H]([C@H]([C@@H]([C@H] 1O)O)O)O[C@H] 1NC(CCC([R])═O)═O |
| | | C₁₀H₁₆NO₇R | |
| 189 | K(COPr) | [chemical structure] | CCCC(NCCCC[C@@H] (C([R])═O)N[R])═O |
| | | C₁₀H₁₈N₂O₂R₂ | |
| 190 | K(COiPr) | [chemical structure] | CC(C)C(NCCCC[C@@H] (C([R])═O)N[R])═O |
| | | C₁₀H₁₈N₂O₂R₂ | |
| 191 | Tzl(Ch) | [chemical structure] | C[N+](C)(C)CCc1cn(C[C@@H] (C([R])═O)N[R])nn1 |
| | | C₁₀H₁₈N₅OR₂⁺ | |
| 192 | hK(Me)3, hKMe3 | [chemical structure] | C[N+](C)(C)CCCCC[C@@H] (C([R])═O)N[R] |
| | | C₁₀H₂₁N₂OR₂⁺ | |
| 193 | hdK(Me)3, hk(Me)3, hdKMe3 | [chemical structure] | C[N+](C)(C)CCCCC[C@H] (C([R])═O)N[R] |
| | | C₁₀H₂₁N₂OR₂⁺ | |
| 194 | Dap(pF(6)) | [chemical structure] | O═C([C@H](CCNc(c(F) c(c([R])c1F)F)c1F)N[R])[R] |
| | | C₁₀H₇F₄N₂OR₃ | |
| 195 | 4OCF3DPhe | [chemical structure] | O═C([C@@H](Cc(cc1) ccc1OC(F)(F)F)N[R])[R] |
| | | C₁₀H₈F₃NO₂R₂ | |
| 196 | CF3F | [chemical structure] | O═C([C@H](Cc1ccc(C(F)(F)F) cc1)N[R])[R] |
| | | C₁₀H₈F₃NOR₂ | |
| 197 | 7AzaW | [chemical structure] | O═C([C@H](Cc1c[nH]c2c1cccn2) N[R])[R] |
| | | C₁₀H₉N₃OR₂ | |
| 198 | Y(CHF2) | [chemical structure] | O═C([C@H](Cc(cc1)ccc1OC(F)F) N[R])[R] |
| | | C₁₀H₉F₂NO₂R₂ | |
| 199 | CXF | [chemical structure] | OC(c1ccc(C[C@@H](C([R])═O) N[R])cc1)═O |
| | | C₁₀H₉NO₃R₂ | |
| 200 | CHF2Phe | [chemical structure] | O═C([C@H](Cc1ccc(C(F)F)cc1) N[R])[R] |
| | | C₁₀H₉F₂NOR₂ | |
| 201 | TetraFAEF | [chemical structure] | NCCOc(c(F)c(c(C[C@@H] (C([R])═O)N[R])c1F)F)c1F |
| | | C₁₁H₁₀F₄N₂O₂R₂ | |
| 202 | 5OHW | [chemical structure] | Oc(cc1)cc2c1[nH]cc2C[C@@H] (C([R]═O)N[R] |
| | | C₁₁H₁₀N₂O₂R₂ | |
| 203 | 4AcDPhe | [chemical structure] | CC(c1ccc(C[C@H](C([R])═O) N[R])cc1)═O |
| | | C₁₁H₁₁NO₂R₂ | |
| 204 | D(NBz) | [chemical structure] | O═C(C[C@@H](C([R])═O) N[R])NCc1ccccc1 |
| | | C₁₁H₁₂N₂O₂R₂ | |
| 205 | aMe2AmTyr | [chemical structure] | C[C@](Cc(cc1)cc(C(N)═O) c1O)(C([R])═O)N[R] |
| | | C₁₁H₁₂N₂O₃R₂ | |
| 206 | psiW | [chemical structure] | [R]C[C@H](Cc1c[nH]c2c1cccc2)N[R] |
| | | C₁₁H₁₂N₂R₂ | |
| 207 | aMeY01 | [chemical structure] | C[C@](Cc(cc1)ccc1OC) (C([R])═O)N[R] |
| | | C₁₁H₁₃NO₂R₂ | |
| 208 | 3OMeY01 | [chemical structure] | COc(ccc(C[C@@H](C([R])═O) N[R])c1)c1OC |
| | | C₁₁H₁₃NO₃R₂ | |
| 209 | | | |
| 210 | dAEF | [chemical structure] | NCCOc1ccc(C[C@H] (C([R])═O)N[R])cc1 |
| | | C₁₁H₁₄N₂O₂R₂ | |
| 211 | K(COBu) | [chemical structure] | CCCCC(NCCCC[C@@H] (C([R])═O)n[R])═O |
| | | C₁₁H₂₀N₂O₂R₂ | |
| 212 | K(COiBu) | [chemical structure] | CCC(C)C(NCCCC[C@@H] (C([R])═O)N[R])═OCC(C) CC(NCCCC[C@@H](C([R])═O) N[R])═O |
| | | C₁₁H₂₀N₂O₂R₂ | |
| 213 | K(COtBu) | [chemical structure] | CC(C)(C)C(NCCCC[C@@H] (C([R])═O)N[R])═O |
| | | C₁₁H₂₀N₂O₂R₂ | |
| 214 | succiniccarn | [chemical structure] | C[N+](C)(C)C[C@@H] (CC(O)═O)NC(CCC([R])═O)═O |
| | | C₁₁H₂₀N₂O₄R⁺ | |
| 215 | Aun | [chemical structure] | O═C(CCCCCCCCCCN[R])[R] |
| | | C₁₁H₂₁NOR₂ | |
| 216 | 5BrW, 5BrTrp | [chemical structure] | O═C([C@H](Cc1c[nH]c(cc2) c1cc2Br)N[R])[R] |
| | | C₁₁H₉BrN₂OR₂ | |
| 217 | 7BrTrp, 7BrW | [chemical structure] | O═C([C@H](Cc1c[nH] c2c1cccc2Br)N[R])[R] |
| | | C₁₁H₉BrN₂OR₂ | |
| 218 | 7ClW, 7ClTrp | [chemical structure] | O═C([C@H](Cc1c[nH] c2c1cccc2Cl)N[R])[R] |
| | | C₁₁H₉ClN₂OR₂ | |
| 219 | 5FW, 5FTrp | [chemical structure] | O═C([C@H](Cc1c[nH] c(cc2)c1cc2F)N[R])[R] |
| | | C₁₁H₉FN₂OR₂ | |
| 220 | 7FW, 7FTrp | [chemical structure] | O═C([C@H](Cc1c[nH] c2c1cccc2F)N[R])[R] |
| | | C₁₁H₉FN₂OR₂ | |
| 221 | BT, L-3- Benzothienyl- alanine | [chemical structure] | O═C([C@H](Cc1csc2c1cccc2)N[R])[R] |
| | | C₁₁H₉NOSR₂ | |
| 222 | 2Quin 6OHQui | [chemical structure] | Oc1ccc(cc(C[C@@H] (C([R])═O)N[R])cc2)c2n1 |
| | | C₁₂H₁₀N₂O₂R₂ | |
| 223 | 7CF2H | [chemical structure] | O═C([C@H](Cc1c[nH] c2c1cccc2C(F)F)N[R])[R] |
| | | C₁₂H₁₀F₂N₂OR₂ | |
| 224 | 3QuinolAla | [chemical structure] | O═C([C@H](Cc1cc2ccccc2nc1) N[R])[R] |
| | | C₁₂H₁₀N₂OR₂ | |
| 225 | 2MeTrp, 2MeW | [chemical structure] | Cc1c(C[C@@H](C([R])═O) N[R])c(cccc2)c2[nH]1 |
| | | C₁₂H₁₂N₂OR₂ | |
| 226 | 5MeW, 5MeTrp | [chemical structure] | Cc(cc1)cc2c1[nH]cc2C[C@@H] (C([R])═O)N[R] |
| | | C₁₂H₁₂N₂OR₂ | |
| 227 | 7MeW, 7(MeW), 7MeTrp | [chemical structure] | Cc1cccc2c1[nH]c2C[C@@H] (C([R])═O)n[R]Cc1cccc2c1[nH] c2C[C@@H](C═O)N |
| | | C₁₂H₁₂N₂OR₂ | |
| 228 | aMeW | [chemical structure] | C[C@](Cc1c[nH]c2c1cccc2) (C([R])═O)N[R] |
| | | C₁₂H₁₂N₂OR₂ | |
| 229 | dW7Me, 7Mew, 7MedW | [chemical structure] | Cc1cccc2c1[nH]c2C[C@H] (C([R])═O)N[R] |
| | | C₁₂H₁₂N₂OR₂ | |
| 230 | Y(OTzl) | [chemical structure] | O═C[C@H](Cc(cc1) ccc1OCc1c[nH]nn1)N[R])[R] |
| | | C₁₂H₁₂N₄O₂R₂ | |
| 231 | 4AllylY | [chemical structure] | C═CCOc1ccc(C[C@@H] (C([R])═O)N[R])cc1 |
| 232 | 4AllylF | [chemical structure] | C═CCc1ccc(C[C@@H] (C([R])═O)N[R])cc1 |
| | | C₁₂H₁₃NOR₂ | |
| 233 | meW, NMeW, NMeTrp, N-Methyl- Tryptophan | [chemical structure] | CN[C@@H](Cc1c[nH] c2c1cccc2)C(O)═O |
| | | C₁₂H₁₄N₂O₂ | |
| | AEF(G) | | [R]C([C@H] |
| | | | (CC1═CC═C(OCCNC(N)═N)C═C1) |
| | | | N[R])═O |
| 234 | AAMPhe | [chemical structure] | CC(NCc1ccc(C[C@@H] (C([R])═O)N[R])cc1)═OCC (NCc1ccc(C[C@@](C═O)N)cc1)═O |
| | | C₁₂H₁₄N₂O₂R₂ | |
| 235 | hC(pXyl) | [chemical structure] | O═C([C@H] (CCSCc1ccc(C[R])cc1)N[R])[R] |
| | | C₁₂H₁₄NOSR₃ | |
| 236 | AEF(NMe(2)) | [chemical structure] | CN(CCOc1ccc(C[C@@H] (C([R])═O)N[R])cc1)[R] |
| | | C₁₂H₁₅N₂O₂R₃ | |
| 237 | DY02 | [chemical structure] | C[C@@H](Cc(cc1)cc(OC) c1OC)(C([R])═O)N[R] |
| | | C₁₂H₁₅NO₃R₂ | |
| 238 | Y02 | [chemical structure] | C[C@](Cc(cc1)cc(OC)c1OC) (C([R])═O)N[R] |
| | | C₁₂H₁₅NO₃R₂ | |
| 239 | AEF(NMe) | [chemical structure] | CNCCOc1ccc(C[C@@H] (C([R])═O)N[R])cc1 |
| | | C₁₂H₁₆N₂O₂R₂ | |
| 240 | NMeAEF | [chemical structure] | CN([C@@H](Cc(cc1) ccc1OCCN)C([R])═O)[R] CN[C@@H](Cc(cc1) ccc1OCCN)C═O |
| | | C₁₂H₁₆N₂O₂R₂ | |
| 241 | aMeAEF | [chemical structure] | C[C@](Cc(cc1)ccc1OCCN) (C([R])═O)N[R] CC(C)(C)OC(NCCOc1ccc(C[C@@] (C)(C([R])═O)N[R])cc1)═O |
| | | C₁₂H₁₆N₂O₂R₂ | |
| 242 | bMeAEF | [chemical structure] | CC([C@@H](C([R])═O)N[R])c(cc1) ccc1OCCN |
| | | C₁₂H₁₆N₂O₂R₂ | |
| 243 | bMeAEF(2S,3R*), bMeAEF(2S3R*) (*pure but configuration unknown) | [chemical structure] | C[C@@H](C@@H] (C([R])═O)N[R])c(cc1)ccc1OCCN |
| | | C₁₂H₁₆N₂O₂R₂ | |
| 244 | bMeAEF(2S3S*), bMeAEF(2S,3S*) (*pure but configuration unknown) | [chemical structure] | C[C@H]([C@@H] (C([R])═O)N[R])c(cc1)ccc1OCCN |
| | | C₁₂H₁₆N₂O₂R₂ | |
| 245 | K(Morph) | [chemical structure] | O═C(CN1CCOCC1) NCCCC[C@@H](C([R])═O)n[R] |
| | | C₁₂H₂₁N₃O₃R₂ | |
| 246 | K(COPent) | [chemical structure] | CCCCCC(NCCCC[C@@H] (C([R])═O)N[R])═O |
| | | C₁₂H₂₂N₂O₂R₂ | |
| 247 | aMeK(Boc) | [chemical structure] | CC(C)(C)OC(NCCCC[C@@] (C)(C([R])═O)N[R])═O |
| | | C₁₂H₂₂N₂O₃R₂ | |
| 248 | E(C) | [chemical structure] | C[N+](C)(C)C[C@H](CC(O)═O) NC(CC[C@@H](C([R])═O)N[R])═O |
| | | C₁₂H₂₂N₃O₄R₂⁺ | |
| 249 | E(c) (R)-2-((R)-4- amino-4-carboxy- butanamido)- 3-carboxy-N,N,N- trimethylpropan-1- aminium, E(c) | [chemical structure] | C[N+](C)(C)C[C@@H](CC(O)═O) NC(CC[C@@H](C([R])═O)N[R])═O |
| | | C₁₂H₂₂N₃O₄R₂⁺ | |
| 250 | e(C), dE(C) | [chemical structure] | C[N+](C)(C)C[C@H](CC(O)═) NC(CC[C@H](C([R])═O)N[R])═O |
| | | C₁₂H₂₂N₃O₄R₂⁺ | |
| 251 | e(c), dE(c) | [chemical structure] | C[N+](C)(C)C[C@@H](CC(O)═O) NC(CC[C@H](C([R])═O)N[R])═O |
| | | C₁₂H₂₂N₃O₄R₂⁺ | |
| 252 | dK(SP6), k(SP6) | [chemical structure] | C[N+](C)(CCN)CC(NCCCC[C@H] (C([R])═O)N[R])═O |
| | | C₁₂H₂₅N₄O₂R₂⁺ | |
| 253 | 7CF3W, (S)-2- amino-3-(7- (trifluoromethyl)- 1H-indol-3-yl) propanoic acid | [chemical structure] | O═C([C@H](Cc1c[nH] c2c1cccc2C(F)(F)F)N[R])[R] N[C@@H](Cc1c[nH] c2c(C(F)(F)F)cccc12)C═O N[C@@H](Cc1c[nH] c2c(C(F)(F)F)cccc12)C═O |
| | | C₁₂H₉F₃N₂OR₂ | |
| 254 | 5Br2Nal | [chemical structure] | O═C([C@H](Cc1cc2cccc(Br) c2cc1)N[R])[R] |
| | | C₁₃H₁₀BrNOR₂ | |
| 255 | 6Br2Nal | [chemical structure] | O═C([C@H](Cc(cc1c2)cc1ccc2Br) N[R])[R] |
| | | C₁₃H₁₀BrNOR₂ | |
| 256 | 7Br2Nal | [chemical structure] | O═C([C@H](Cc1cc2cc(Br)ccc2cc1) N[R])[R] |
| | | C₁₃H₁₀BrNOR₂ | |
| 257 | 6F2Nal | [chemical structure] | O═C([C@H](Cc(ccc1c2)cc1ccc2F )N[R])[R] N[C@@H(Cc1ccc(cc(cc2)F) c2c1)C═O |
| | | C₁₃H₁₀FNOR₂ | |
| 258 | 7OH2Nal | [chemical structure] | Oc1ccc(ccc(C[C@@H] (C([R])═O)N[R1])c2)c2c1 |
| | | C₁₃H₁₁NO₂R₂ | |
| 259 | 1Nal, Nal, | [chemical structure] | O═C([C@H] (Cc1cccc2ccccc12)N[R])[R] |
| | | C₁₃H₁₁NOR₂ | |
| 260 | 2Nal | [chemical structure] | O═C([C@H] (Cc1cc2ccccc2cc1)N[R])[R] |
| | | C₁₃H₁₁NOR₂ | |
| 261 | dNal, d2Nal | [chemical structure] | O═C([C@@H] (Cc1cc2ccccc2cc1)N[R])[R] |
| | | C₁₃H₁₁NOR₂ | |
| 262 | 6MeQui | [chemical structure] | COc1ccc(cc(C[C@@H] (C([R])═O)N[R])cc2)c2n1 |
| | | C₁₃H₁₂N₂O₂R₂ | |
| 263 | D(N5In) | [chemical structure] | O═C(C[C@@H](C([R])═O) N[R])NCc(cc1)cc2c1[nH]cc2 |
| | | C₁₃H₁₃N₃O₂R₂ | |
| 264 | psi2Nal | [chemical structure] | [R]C[C@H](Cc1cc2ccccc2cc1)N[R] |
| | | C₁₃H₁₃NR₂ | |
| 265 | 7EtW | [chemical structure] | CCc1cccc2c1[nH] cc2C[C@@H](C([R])═O)N[R] |
| | | C₁₃H₁₄N₂OR₂ | |
| 266 | F(4TzlMME) | [chemical structure] | COCc1cn(-c2ccc(C[C@@H] (C([R])═O)N[R])cc2)nn1 |
| | | C₁₃H₁₄N₄O₂R₂ | |
| 267 | AcAEF | [chemical structure] | CC(NCCOc1ccc(C[C@@H] (C([R])═O)N[R])cc1)═O |
| | | C₁₃H₁₆N₂O₃R₂ | |
| 268 | tButY, Y(tBu) | [chemical structure] | CC(C)(C)Oc1ccc(C[C@@H] (C([R])═O)N[R])cc1 |
| | | C₁₃H₁₇NO₂R₂ | |
| 269 | AEF(Me)2 | [chemical structure] | CN(C)CCOc1ccc(C[C@@H] (C([R])═O)N[R])cc1 |
| | | C₁₃H₁₈N₂O₂R₂ | |
| 270 | Z, Amp | [chemical structure] | CC(C)c1ccc(C[C@@H] (C([R])═O)NCN[R])cc1 |
| | | C₁₃H₁₈N₂OR₂ | |
| 271 | 5amido2Nal | [chemical structure] | NC(c1c(ccc(C[C@@H] (C([R])═O)N[R])c2)c2ccc1)═O |
| | | C₁₄H₁₂N₂O₂R₂ | |
| 272 | 6amido2Nal | [chemical structure] | NC(c1ccc(cc(C[C@@H] (C([R])═O)N[R])cc2)c2c1)═O |
| | | C₁₄H₁₂N₂O₂R₂ | |
| 273 | 5OMe2Nal | [chemical structure] | COc1c(ccc(C[C@@H] (C([R])═O)N[R])c2)c2ccc1 |
| | | C₁₄H₁₃NO₂R₂ | |
| 274 | 6OMe2Nal | [chemical structure] | COc1ccc(cc(C[C@@H] (C([R])═O)N[R])cc2)c2c1 |
| | | C₁₄H₁₃NO₂R₂ | |
| 275 | 5Me2Nal | [chemical structure] | Cc1c(ccc(C[C@@H] (C([R])═O)N[R])c2)c2ccc1 |
| | | C₁₄H₁₃NOR₂ | |
| 276 | NMe2NAL | [chemical structure] | CN([C@@H](Cc1cc2ccccc2cc1) C([R])═O)[R] CN[C@@H](Cc1cc2ccccc2cc1)C═O |
| | | C₁₄H₁₃NOR₂ | |
| 277 | aMe2Nal | [chemical structure] | C[C@](Cc1cc2ccccc2cc1) (C([R])═O)N[R] |
| | | C₁₄H₁₃NOR₂ | |
| 278 | bMe2Nal(2S,3R), bMe2Nal(2S3R) | [chemical structure] | C[C@@H](C@@H](C([R])═O) N[R])c1cc2ccccc2cc1 |
| | | C₁₄H₁₃NOR₂ | |
| 279 | bMe2Nal(2S3S), bMe2Nal(2S3R) | [chemical structure] | C[C@H]([C@@H](C([R])═O) N[R])c1cc2ccccc2cc1 |
| | | C₁₄H₁₃NOR₂ | |
| 280 | AEF(EtCO) | [chemical structure] | CCC(NCCOc1ccc(C[C@@H] (C([R])═O)N[R])cc1)═O |
| | | C₁₄H₁₈N₂O₃R₂ | |
| 281 | NMeY(tBu) | [chemical structure] | CC(C)(C)Oc1ccc(C[C@H] (C([R])═O)N(C)[R])cc1 |
| | | C₁₄H₁₉NO₂R₂ | |
| 282 | AEF(NMe3) | [chemical structure] | C[N+](C)(C)CCOc1ccc(C[C@@H] (C([R])═O)N[R])cc1 |
| | | C₁₄H₂₁N₂O₂R₂⁺ | |
| 283 | 6O(COCF3)2Nal | [chemical structure] | O═C([C@H] (Cc(ccc1c2) cc1ccc2OC(C(F)(F)F)═O)N[R])[R] |
| | | C₁₅H₁₀F₃NO₃R₂ | |
| 284 | BIF | [chemical structure] | O═C([C@H](Cc(cc1)ccc1- c1ccccc1)N[R])[R] |
| | | C₁₅H₁₃NOR₂ | |
| 285 | DiPhAla | [chemical structure] | O═C([C@H](C(c1ccccc1) c1ccccc1)N[R])[R] |
| | | C₁₅H₁₃NOR₂ | |
| 286 | 5Et2Nal | [chemical structure] | CCc1(ccc(C[C@H] (C([R])═O)N[R])c2)c2ccc1 |
| | | C₁₅H₁₅NOR₂ | |
| 287 | CMF | [chemical structure] | CC(C)(C)OC(COc1ccc(C[C@@H] (C([R])═O)N[R])cc1)═O |
| | | C₁₅H₁₉NO₄R₂ | |
| 288 | F(4TzlTMA1) | [chemical structure] | C[N+](C)(C)Cc1cn(-c2ccc(C[C@@H] (C([R])═O)N[R])cc2)nn1 |
| | | C₁₅H₂₀N₅OR₂⁺ | |
| 289 | PiperazinequatF | [chemical structure] | C[N+](C)(CC1)CCN1c1ccc(C[C@@H] (C([R])═O)N[R])cc1 |
| | | C₁₅H₂₂N₃OR₂⁺ | |
| 290 | TMA3F | [chemical structure] | C[N+](C)(C)CCCOc1ccc(C[C@@H] (C([R])═O)N[R])cc1 |
| | | C₁₅H₂₃N₂O₂R₂⁺ | |
| 291 | TMA4F | [chemical structure] | C[NH+](C)CCCCOc1ccc(C[C@@H] (C([R])═O)N[R])cc1 |
| | | C₁₅H₂₃N₂O₂R₂⁺ | |
| 292 | K5cpa, K(5cpa), K(5cpaCO) | [chemical structure] | C[N+](C)(C) CCCCCC(NCCCC[C@@H] (C([R])═O)N[R])═O |
| | | C₁₅H₃₀N₃O₂R₂⁺ | |
| 293 | dK(5cpa), k(5cpa), k(5cpaCO) | [chemical structure] | C[N+](C)(C)CCCCCC(NCCCC[C@H] (C([R])═O)N[R])═O |
| | | C₁₅H₃₀N₃O₂R₂⁺ | |
| 294 | 2Nal6(3pyrazole) | [chemical structure] | O═C([C@H] (Cc(ccc1c2)cc1ccc2-c1c[nH] nc1)N[R])[R] |
| | | C₁₆H₁₃N₃OR₂ | |
| 295 | 7PyrTrp | [chemical structure] | O═C([C@H](Cc1c[nH] c2c1cccc2-c1ccncc1)N[R])[R] |
| | | C₁₆H₁₃N₃OR₂ | |
| 296 | 4BzF | [chemical structure] | O═C([C@H](Cc(cc1) ccc1C(c1ccccc1)═O)N[R])[R] |
| | | | C₁₆H₁₃NO₂R₂ |
| 297 | aMeBiF | [chemical structure] | C[C@](Cc(cc1)ccc1-c1ccccc1) (C([R])═O)N[R] |
| | | C₁₆H₁₅NOR₂ | |
| 298 | NPyEF | [chemical structure] | O═C([C@H](Cc(cc1)ccc1OCC[n+] 1ccccc1)N[R])[R] |
| | | C₁₆H₁₇N₂O₂R₂⁺ | |
| 299 | 5iPr2Nal | [chemical structure] | CC(C)c1c(ccc(C[C@@H] (C([R])═O)N[R])c2)c2ccc1 |
| | | C₁₆H₁₇NOR₂ | |
| 300 | TetraFAEF(Boc) | [chemical structure] | CC(C)(C)OC(NCCOc(c(F) c(c(C[C@@H] (C([R])═O)N[R])c1F)F)c1F)═O |
| | | C₁₆H₁₈F₄N₂O₄R₂ | |
| 301 | 4TMABYF | [chemical structure] | C[N+](C)(C)CCC#Cc1ccc(c[C@@H] (C([R])═O)N[R])cc1 |
| | | C₁₆H₂₁N₂OR₂⁺ | |
| 302 | AEF(Boc) | [chemical structure] | CC(C)(C)OC(NCCOc1ccc(C[C@@H] (C([R])═O)N[R])cc1)═O |
| | | C₁₆H₂₂N₂O₄R₂ | |
| 303 | F(4TzlTMA2) | [chemical structure] | C[N+](C)(C)CCc1cn(-c2ccc(C[C@@H] (C([R])═O)N[R])cc2)nn1 |
| | | C₁₆H₂₂N₅OR₂⁺ | |
| 304 | DMPMF | [chemical structure] | C[N+]1(C)CC(COc2ccc(C[C@@H] (C([R])═O)N[R])cc2)OCC1 |
| | | C₁₆H₂₃N₂O₃R₂⁺ | |
| 305 | KDde, K(Dde) | [chemical structure] | CC(C)(CC(C1═C(C)NCCCC[C@@H] (C([R])═O)N[R])═O)CC1═O |
| | | C₁₆H₂₄N₂O₃R₂ | |
| 306 | dKDde, k(Dde), dK(Dde) | [chemical structure] | CC(C)(CC(C1═C(C)NCCCC[C@H] (C([R])═O)N[R])═O)CC1═O |
| | | C₁₆H₂₄N₂O₃R₂ | |
| 307 | Y(OEOXIMECh) | [chemical structure] | C[N+](C)(C)CCO/ N═C/COc1ccc(C[C@@H] (C([R])═O)N[R])cc1 |
| | | C₁₆H₂₄N₃O₃R₂⁺ | |
| 308 | Y(OZOXIMECh) | [chemical structure] | C[N+](C)(C)CCO/ N═C\COc1ccc(C[C@@H] (C([R])═O)N[R])cc1 |
| | | C₁₆H₂₄N₃O₃R₂⁺ | |
| 309 | AEF(NHCh) | [chemical structure] | C[N](C)(C)CCNCCOc1ccc(C[C@@H] (C([R])═O)N[R])cc1 |
| | | C₁₆H₂₆N₃O₂R₂⁺ | |
| 310 | K(Biotina), K(Biotin) | [chemical structure] | O═C(CCCC[C@@H[([C@@H]1N2) SC[C@H]1NC2═O)NCCCC[C@@H] (C([R])═O)N[R] |
| | | C₁₆H₂₆N₄O₃SR₂ | |
| 311 | K(DAGSuc) | [chemical structure] | OC[C@H]([C@H]([C@@H]([C@H] 1O)O)O)O[C@H] 1NC(CCC(NCCCC[C@@H] (C([R]═O)N[R])═O═O |
| | | C₁₆H₂₇N₃O₈R₂ | |
| 312 | k(DAGSuc), dK(DAGSuc) | [chemical structure] | OC[C@H]([C@H]([C@@H]([C@H] 1O)O)O)O[C@H] 1NC(CCC(NCCCC[C@H] (C([R])═O)N[R])═O)═O |
| | | C₁₆H₂₇N₃O₈R₂ | |
| 313 | DOTA | [chemical structure] | OC(CN1CCN(CC(O)═O) CCN(CC([[R])═O)CCN(CC(O)═O) CC1)═O |
| | | C₁₆H₂₇N₄O₇R | |
| 314 | Dab(NMeCarn) | [chemical structure] | CN(CC[C@@H](C([R])═O)N[R]) C(CCC(N[C@@H] (CC(O)═O)C[N+](C)(C)C)═O)═O |
| | | C₁₆H₂₉N₄O₅R₂⁺ | |
| 315 | Dab(NMecarn | [chemical structure] | CN(CC[C@@H](C([R])═O)N[R]) C(CCC(N[C@H] (CC(O)═O)C[N +](C)(C)C)═O)═O |
| | | C₁₆H₂₉N₄O₅R₂⁺ | |
| 316 | orn(d) | [chemical structure] | C[N+](C)(C)C[C@@H](CC(O)═O) NC(CCC(NCCC[C@H](C([R])═O) N[R])═O)═O |
| | | C₁₆H₂₉N₄O₅R₂⁺ | |
| 317 | 2Nal6((5CF3) 3pyrazole) | [chemical structure] | O═C([C@H](Cc(cc1c2cc1ccc2- c1c[nH]nc1C(F)(F)F)N[R])[R] |
| | | C₁₇H₁₂F₃N₃OR₂ | |
| 318 | 7(2ClPh)W | [chemical structure] | O═C([C@H](Cc1c[nH]c2c1ccc2- c(cccc1)c1Cl)N[R])[R] |
| | | C₁₇H₁₃ClN₂OR₂ | |
| 319 | TMAPF | | C[N+](C)(CCCCCOc1ccc(C[C@H] |
| | | | (N[R])C([R])═O)cc1)C |
| 320 | 7(2OMe5Pyr)W | [chemical structure] | COc(cc1)ncc1-c1cccc2c1[nH] cc2C[C@@H](C([R])═O)N[R] |
| | | C₁₇H₁₅N₃O₂R₂ | |
| 321 | W-7Ph, 7-phenyl-L- tryptophan | [chemical structure] | N[C@@H](Cc1c[nH]c2c1ccc2- c1ccccc1)C═O |
| | | C₁₇H₁₆N₂O | |
| 322 | 5OH2Nal | [chemical structure] | CC(C)(C)Oc1c(ccc(C[C@@H] (C([R])═O)N[R])c2)c2ccc1 |
| | | C₁₇H₁₉NO₂R₂ | |
| 323 | 5tBu2Nal | C₁₇H₁₉NOR₂ | CC(C)(C)c1c(ccc(C[C@@H] |
| | | | C([R])═O)N[R])c2)c2ccc1 |
| 324 | hFTMAPF | [chemical structure] | C[N+](C)(C) CC(C(C(COc1ccc(C[C@@H] (C([R])═O)N[R])cc1)(F)F)(F)F)(F)F |
| | | C₁₇H₂₁F₆N₂O₂R₂⁺ | |
| 325 | F(4TzlTMA3) | [chemical structure] | C[N+](C)(C)CCCc1cn(-c2ccc(C[C@@H] (C([R])═O)N[R])cc2)nn1 |
| | | C₁₇H₂₄N₅OR₂⁺ | |
| 326 | DMMMF | [chemical structure] | C[N+]1(C)CC(COc2ccc(C[C@@H] (C([R])═O)N[R])cc2)CCC1 |
| | | C₁₇H₂₅N₂O₂R₂⁺ | |
| 327 | MMoEF | [chemical structure] | C[N+]1(CCOc2ccc(C[C@@H] (C([R])═O)N[R])cc2)CCCCC1 |
| | | C₁₇H₂₅N₂O₂R₂⁺ | |
| 328 | MMoPF | [chemical structure] | C[N+1(CCCOc2ccc(C[C@H] (C([R])═O)N[R])cc2)CCOCC1 |
| | | C₁₇H₂₅N₂O₃R₂⁺ | |
| 329 | AEF(MEP) | [chemical structure] | COCCOCCCNCCOc1ccc(C[C@@H] (C([R])═O)N[R])cc1 |
| | | C₁₇H₂₆N₂O₄R₂ | |
| 330 | 4DMPzEF | [chemical structure] | C[N+]1(C)CCN(CCOc2ccc(C[C@@H] (C([R])═O)N[R])cc2)CC1C [N+]1(C)CCN(CCOc2ccc(C[C@@H] (C═O)N)cc2)CC1 |
| | | C₁₇H₂₆N₃O₂R₂⁺ | |
| 331 | TMAPF | [chemical structure] | C[N+](C)(C)CCCCCOc1ccc(C[C@@H] (C([R]═O)N[R])cc1 C[N+](C)(C)CCCCCOc1ccc(C[C@H] (C═O)N)cc1 |
| | | C₁₇H₂₇N₂O₂R₂⁺ | |
| 332 | K(D), KCar | [chemical structure] | C[N+](C)(C)C[C@H](CC(O)═O) NC(CCC(NCCCC[C@@H] (C([R])═ON[R])═O)═O |
| | | C₁₇H₃₁N₄O₅R₂⁺ | |
| 333 | K(d), KdCar | [chemical structure] | C[N+](C)(C)C[C@@H](CC(O)═O) |
| | | | NC(CCC(NCCCC[C@@H](C([R])═O) |
| | | | N[R])═O)═O |
| | | C₁₇H₃₁N₄O₅R₂⁺ | |
| 334 | k(D), dKCar | [chemical structure] | C[N+](C)(C)C[C@H](CC(O)═O) NC(CCC(NCCCC[C@H](C([R])═O) N[R])═O)═O |
| | | C₁₇H₃₁N₄O₅R₂⁺ | |
| 335 | k(d), dKdCar | [chemical structure] | C[N+](C)(C)C[C@@H](CC(O)═O) NC(CCC(NCCCC[C@H](C([R])═O) N[R])═O)═O |
| | | C₁₇H₃₁N₄O₅R₂⁺ | |
| 336 | 7(3CF3TAZP)W | [chemical structure] | O═C([C@H](Cc1[nH]c2c1cccc2- c1cc1nnc(C(F)(F)F)n2cc1)N[R])[R] |
| | | C₁₈H₁₂F₃N₅OR₂ | |
| 337 | 7(4OCF3Ph)W | [chemical structure] | O═C([C@H](Cc1c[nH]c2c1cccc2- c(cc1)ccc1OC(F)(F)F)N[R])[R] |
| | | C₁₈H₁₃F₃N₂O₂R₂ | |
| 338 | 7(4CF3Ph)W | [chemical structure] | O═C([C@H](Cc1c[nH]c1c1cccc2- c1ccc(C(F)(F)F)cc1)N[R])[R] |
| | | C₁₈H₁₃F₃N₂OR₂ | |
| 339 | 7(7ImidPyr)W | [chemical structure] | O═C([C@H](Cc1c[nH]c2c1cccc2- c1cc2nccn2cc1)N[R])[R] |
| | | C₁₈H₁₄N₄OR₂ | |
| 340 | Y(C9OH) | [chemical structure] | OC(CCCCCCCCOc1ccc(C[C@@H] (C([R])═O)N[R])cc1)═O |
| | | C₁₈H₂₅NO₄R₂ | |
| 341 | Y(OTzlCh) | [chemical structure] | C[N+](C)(C) CCc1cn(CCOc2ccc(C[C@@H] (C([R])═O)N[R])cc2)nn1 |
| | | C₁₈H₂₆N₅O₂R₂⁺ | |
| 342 | 4DMPEF | [chemical structure] | C[N+]1(C)CCC(CCOc2ccc(C[C@@H] (C([R])═O)N[R]cc2)CC1 C[N+]1(C)CCC(CCOc2ccc(C[C@@H] (C═O)N)cc2)CC1 |
| | | C₁₈H₂₇N₂O₂R₂⁺ | |
| 343 | AEF(AcCh) | [chemical structure] | CC(N(CC[N+] (C)(C)C)CCOc1ccc(C[C@@H] (C([R])═O)N[R])cc1)═O |
| | | C₁₈H₂₈N₃O₃R₂⁺ | |
| 344 | TMA6F | [chemical structure] | C[N+](C)(C) CCCCCCOc1ccc(C[C@@H] (C([R])═O)N[R])cc1 |
| | | C₁₈H₂₉N₂O₂R₂⁺ | |
| 345 | AEF(MePrpa) | [chemical structure] | CN(CCC[N+](C)(C)C) CCOc1ccc(C[C@@H] (C([R])═O)N[R])cc1 |
| | | C₁₈H₃₀N₃O₂R₂⁺ | |
| 346 | 2Nal6(Ph2OH) | [chemical structure] | Oc(cccc1)c1- c1ccc(cc(C[C@@H] (C([R])═O)N[R])cc2)c2c1 |
| | | C₁₉H₁₅NO₂R₂ | |
| 347 | 7(3NAcPhW | [chemical structure] | CC(Nc1cccc(-c2cccc3c2[nH] cc3C[C@@H](C([R])═O)N[R])c1)═O |
| | | C₁₉H₁₇N₃O₂R₂ | |
| 348 | 7(4NAcPh) | [chemical structure] | CC(Nc(cc1)ccc1-c1cccc2c1[nH] cc2C[C@@H](C([R])═O)N[R])═O |
| | | C₁₉H₁₇N₃O₂R₂ | |
| 349 | 4PipPhe | C₁₉H₂₆N₂O₃R₂ | CC(C)(C)OC(N(CC1) |
| | | | CCC1c1ccc(C[C@@H] |
| | | | (C([R])═O)N[R])cc1)═O |
| 350 | A | [chemical structure] | C[N+](C)(C)[C@@9H]1CC[C@H] (COc2ccc(C[C@@H] (C([R])═O)N[R])cc2)CC1 |
| | | C₁₉H₂₉N₂O₂R₂⁺ | |

TABLE 2D
Peg Moeties and Peg-modified Monomers

| 1 | Structure | Names and Synonyms | Smiles Structure |
|---|---|---|---|
| 2 | C7H15NO3 | CON(MePEG2) | CN(CCOCCOC)C═O |
| 3 | C7H14O4 | mPEG3CO | COCCOCCOCC═O |
| 4 | C14H28O7 | mPEG6CO | COCCOCCOCCO |
| | | | CCOCCOCCC═O |
| 5 | C21H36N3O5+ | AEFNMePEG3a, | C[N+](C)(C)CCOC |
| | | AEF(NHcPEG3a) | COCCC(NCCOc1c |
| | | | cc(C[C@@H](C═ |
| | | | O)N)cc1)═O |
| 6 | C24H42N2O8 | AEFNmPEG6, | COCCOCCOCCO |
| | | AEF(NmPEG6) | CCOCCOCCNCC |
| | | | Oc1ccc(C[C@@H] |
| | | | (C═O)N)cc1 |
| 7 | [chemical structure] | BiotinPEG2PEG2, Biotin(PEG2PEG2) | O═C(CCCC[C@@ H]([C@H]1N2)SC [C@@H]1NC2═O) NCCOCCOCC(NC COCCOCC([R])═ O)═O |
| | C22H37N4O8SR | | |
| 8 | [chemical structure] | K(PEG2PEG2gEC18 OH) | OC(CCCCCCCCC CCCCCCCC(N[C @@H](CCC(NCC OCCOCC(NCCOC COCC(NCCCC[C @@H](C([R])═O) N[R])═O)═O)═O)C (O)═O)═O)═O |
| | C41H73N5O13R2 | | |
| 9 | [chemical structure] | K(PEG6gEBiotin) | OC([C@H](CCC (NCCOCCOCCOC COCCOCCOCCC (NCCCC[C@@H] (C([R])═O)N[R]) O)═O)NC(CCCC [C@H]([C@@H]1 N2)SC[C@H]1NC 2═O)═O)═O |
| | C36H62N6O13SR2 | | |
| 10 | [chemical structure] | K(PEG6gEVitE) | CC(C)CCC[C@@H] (C)CCC[C@@H](C) CCC[C@](C)(CC1) Oc(c(C)c2C)c1c(C) c2OCC(N[C@@H] (CCC(NCCOCCOC COCCOCCOCCOC CC(NCCCC[C@@H] (C([R])═O)N[R])═ O)═O)C(O)═O)═O |
| | C57H98N4O14R2 | | |
| 11 | [chemical structure] | MPzPEG3F | CN1CC[N+](C)(CC OCCOCCOc2ccc(C [C@@H](C([R])═ O)N[R])cc2)CC1 |
| | C21H34N3O4R2+1 | | |
| 12 | [chemical structure] | TBAPEG3F | CCCC[N+](CCCC) (CCCC)CCOCCO CCOc1ccc(C[C@ @H](C([R])═O)N [R])cc1 |
| | C27H47N2O4R2+ | | |
| 13 | [chemical structure] | Y(OTzlPEG3a) | C[N+](C)(C)CCOC COCCOCc1cn(CC Oc2ccc(C[C@@H] (C([R])═O)N[R])cc 2)nn1 |
| | C23H36N5O5R2+ | | |
| 14 | [chemical structure] | Y(OTzlPEG4a) | C[N+](C)(C)CCOC COCCOCCOCc1c n(CCOc2ccc(C[C @@H](C([R])═O) N[R])cc2)nn1 |
| | C25H40N5O6R2+ | | |
| 15 | [chemical structure] | k(PEG6Biotin), dK(PEG6Biotin) | O═C(CCOCCOCC OCCOCCOCCOC COCCOCCOCCO CCOCCOCCNC(C Br)═O)NCCCC[C @H](C([R])═O)N[R] |
| | C35H66BrN3O15R2 | | |
| 16 | [chemical structure] | k(dPEG12Ac), dK(dPEG12Ac) | CC(C)CCC[C@@ H](C)CCC[C@@H] (C)CCC[C@](C) (CC1)Oc(c(C)c2C)c 1c(C)c2OCC(NCC OCCOCCOCCOC COCCOCCC(NCC CC[C@H](C([R])═ O)N[R])═O)═O |
| | C52H91N3O11R2 | | |
| 17 | [chemical structure] | mPEG2TMA2F | C[N+](C)(CCOC)C COc1ccc(C[C@@ H](C([R]═)O)N[R]) cc1 |
| | C16H25N2O3R2+ | | |
| 18 | [chemical structure] | mPEG3TMA4F | C[N+](C)(CCCCO c1ccc(C[C@@H](C ([R])═O)N[R])cc1) CCOCCOC |
| | C20H33N2O4R2+ | | |
| 19 | [chemical structure] | C[N+](C)(C)CCOCCO c1ccc(C[C@@H](C ([R])═O)N[R])cc1 | |
| | C16H25N2O3R2+ | | |
| 20 | [chemical structure] | C[N+](C)(C)CCOCCO C[C@@H](C([R])═O) N[R] | |
| | C10H21N2O3R2+ | | |
| 21 | [chemical structure] | C[N+](C)(C)CCOCCOC C(C([R])═O)N[R] | |
| | C10H21N2O3R2+ | | |
| 22 | [chemical structure] | CC(NCCOCCOCCOC COCCOCCOCCC ([R])═O)═O | |
| | C17H32NO8R | | |
| 23 | [chemical structure] | O═C(CCCC[C@@H] ([C@H]1N2)SC[C@ @H]1NC2═O)NCCO CCOCCC([R])═O | |
| | C17H28N3O5SR | | |
| 24 | [chemical structure] | O═C(CBr)NCCOCCOC COCCOCCOCCOCCC ([R])═O | |
| | C17H31BrNO8R | | |
| 25 | [chemical structure] | COCCOCCOCCOCCO CCOCCOCCOCCN[R] | |
| | C17H36NO8R | | |
| 26 | [chemical structure] | CN(CC[C@@H](C ([R])═O)N[R])C(COC COCC[N+](C)(C)C)═O | |
| | C14H28N3O4R2+ | | |
| 27 | [chemical structure] | CN(CC[C@@H](C ([R])═O)N[R])C(CCOC COCC[N+](C)(C)C)═O | |
| | C15H30N3O4R2+ | | |
| 28 | [chemical structure] | C[N+](C)(C)CCOCCOC CNC(CC[C@@H](C ([R])═O)N[R])═O | |
| | C14H28N3O4R2+ | | |
| 29 | [chemical structure] | CN(CCCC[C@@H](C ([R])═O)N[R])C(CCOC COCC[N+](C)(C)C)═O | |
| | C17H34N3O4R2+ | | |
| 30 | [chemical structure] | C[N+](C)(CCCC[C@@ H](C([R])═O)N[R])CC OCCOC | |
| | C13H27N2O3R2+ | | |
| 31 | [chemical structure] | OCCOCCOCCn1nnc(C [C@@H](C([R])═O)N [R])c1 | |
| | C11H18N4O4R2 | | |
| 32 | [chemical structure] | COCCOCCOCCn1nnc(C [C@@H](C([R])═O)N [R])c1 | |
| | C12H20N4O4R2 | | |
| 33 | [chemical structure] | C[N+](C)(CCclcn(C[C@ @H](C([R])═O)N[R]) nn1)CCOC | |
| | C12H22N5O2R2+ | | |
| 34 | [chemical structure] | C[N+](C)(CCclcn(C[C@ @H](C([R])═O)N[R]) nn1)CCOCCOCCOC | |
| | C16H30N5O4R2+ | | |
| 35 | [chemical structure] | C[N+](C)(C)CCOCCO CCC([R])═O | |
| | C10H21NO3R+ | | |
| 36 | [chemical structure] | CNCCOCCOC[C@H] (C([R])═O)N[R] | |
| | C8H16N2O3R2 | | |
| 37 | [chemical structure] | (SulfoCy3dPEG2) | CC1(C)c(cc(cc2)S (O)(═O)═O)c2[N+] (C)═C1/C═C/C═C (/C1(C)C)\N(CCCC CC(NCCOCCOCC C([R])═O)═O)c(cc 2)c1cc2S(O)(═O)═O |
| | C37H49N3O10S2R+ | | |
| 38 | [chemical structure] | (SulfoCy3dPEG3) | CC1(C)c(cc(cc2)S (O)(═O)═O)c2[N+] (C)═C1/C═C/C═C (/C1(C)C)\N(CCCC CC(NCCOCCOCC OCCC([R])═O)═O) c(cc2)c1cc2S(O) (═O)═O |
| | C39H53N3O11S2R+ | | |
| 39 | [chemical structure] | (d)gEPEG2PEG2 | C[N+](C)(C)C[C@ @H](CC(O)═O)N C(CCC(N[C@@H] (CCC(NCCOCCO CC(NCCOCCOCC ([R])═O)═O)═O)C (O)═O)═O)═O |
| | C28H49N5O13R+ | | |
| 40 | [chemical structure] | AcdPEG12CO | CC(NCCOCCOCC OCCOCCOCCOC COCCOCCOCCO |
| | | | CCOCCOCCC═ |
| | | | O)═O |
| 41 | [chemical structure] | AcdPEG9CO | CC(NCCOCCOCC OCCOCCOCCOC COCCOCCOCCC═ |
| | | | O)═O |
| 42 | [chemical structure] | AEEP(PEG2PEG2gEC 18OH) | OC(CCCCCCCCC CCCCCCCC(N[C @@H](CCC(NCC |
| | | | OCCOCC(NCCOC |
| | | | COCC(NCCOCCO |
| | | | CCC([R])═O)═O)═ |
| | | | O)═O)C(O)═O)═) |
| | | | O═O |
| 43 | [chemical structure] | AEEPPEG2PEG2gEC18 OH, k(PEG2Sp6PEG2g EC18OH), dK(PEG2Sp6 PEG2gEC18OH) | C[N+](C)(CCNC(C OCCOCCNC(CC[C @@H](C(O)═O) NC(CCCCCCCCC |
| | | | CCCCCCCC(O)═ |
| | | | O)═O)═O)═O)CC |
| | | | (NCCOCCOCC(NC |
| | | | CCC[C@H](C([R])═ |
| | | | O)N[R])═O)═O |
| 44 | [chemical structure] | AEF((Ch)cPEG3a) | C[N+](C)(C)CCN(C COc1ccc(C[C@@H] (C([R])═O)N[R])cc1) C(CCOCCOCC[N+] (C)(C)C)═O |
| | C26H46N4O5R2+2 | | |
| 45 | [chemical structure] | AEF(BisPEG2a)(RS) AEF(BisPEG2a)(S*) (The RS and the S* indicates the stereo- chemistry) | C[N+](C)(C)CCOCC N(CCOCC[N+](C)(C) C)CCOc1ccc(CC(C ([R])═O)N[R])cc1 |
| | C25H46N4O4R2+2 | | |
| 46 | [chemical structure] | AEF(NMePEG3a), AEF(NMecPEG3aCO) | C[N+](C)(C)CCOCC COCCC(NCCOc1ccc (C[C@@H](C([R])═ O)N[R])cc1)═O |
| | C21H34N3O5R2+ | | |
| 47 | [chemical structure] | AEF(NMe2mPEG3) | C[N+](C)(CCOCCOC COC)CCOc1ccc(C [C@@H](C([R])═O) N[R])cc1 |
| | C20H33N2O5R2+ | | |
| 48 | [chemical structure] | AEF(NMeBismPEG3) | C[N+](CCOCCOCCO C)(CCOCCOCCOC) CCOc1ccc(C[C@@H] (C([R])═O)N[R])cc1 |
| | C26H45N2O8R2+ | | |
| 49 | [chemical structure] | AEF(NMePEG2a) | CN(CCOCC[N+] (C)(C)C)CCOc1ccc (C[C@H](C([R])═O) N[R])cc1 |
| | C19H32N3O3R2+ | | |
| 50 | [chemical structure] | AEF(NmPEG6) | COCCOCCOCCO CCOCCOCCNCC Oc1ccc(C[C@@H] (C([R])═O)N[R])cc1 |
| | C24H40N2O8R2 | | |
| 51 | [chemical structure] | AEF(PEG2PEG2gEC16 OH) | OC(CCCCCCCCC CCCCCC(N[C@@ H](CCC(NCCOCC OCC(NCCOCCOC |
| | | | C(NCCOc1ccc(C[C |
| | | | @@H](C([R])═O) |
| | | | N[R])cc1)═O)═O)═ |
| | | | O)C(O)═O)═O)═O |
| 52 | [chemical structure] | AEF(PEG2PEG2gEC18 OH | OC(CCCCCCCCC CCCCCCCC(N[C @@H](CCC(NCC OCCOCC(NCCOCC |
| | | | OCC(NCCOc1ccc(C |
| | | | [C@@H](C([R])═O) |
| | | | N[R])cc1)═O)═O)═ |
| | | | O)C(O)═O)═O)═O |
| 53 | [chemical structure] | AEF(Peg2a), AEF(PEG 2a) | C[N+](C)(C)CCOC CNCCOc1ccc(C[C @@H](C([R])═O) N[R])cc1 |
| | C18H30N3O3R2+ | | |
| 54 | [chemical structure] | AEF(SP6PEG12gEC18 OH) | C[N+](C)(CCNC(C COCCOCCOCCOCC OCCOCCOCCOCCO CCOCCOCCOCCNC |
| | | | (CC[C@@H](C(O)═ |
| | | | O)NC(CCCCCCCC |
| | | | CCCCCCCCC(O)═ |
| | | | O)═O)═O)═O)CC(N |
| | | | CCOc1ccc(C[C@@ |
| | | | H](C([R])═O)N[R]) |
| | | | cc1)═O |
| 55 | [chemical structure] | AEF(SP6PEG12gEC20 OH) | C[N+](C)(CCNC(C COCCOCCOCCO CCOCCOCCOCC OCCOCCOCCOC |
| | | | COCCNC(CC[C@ |
| | | | @H](C(O)═O)NC(C |
| | | | CCCCCCCCCCC |
| | | | CCCCCCC(O)═O)═ |
| | | | O)═O)═O)CC(NC |
| | | | COc1ccc(C[C@@ |
| | | | H](C([R])═O)N[R]) |
| | | | cc1)═O |
| 56 | [chemical structure] | AEF(SP6PEG2PEG2g EC18OH) | C[N+](C)(CCNC(C OCCOCCNC(COC COCCNC(CC[C@ @H](C(O)═O)NC(C |
| | | | CCCCCCCCCCCC |
| | | | CCCC(O)═O)═O)═ |
| | | | O)═O)═O)CC(NC |
| | | | COc1ccc(C[C@@ |
| | | | H](C([R])═O)N |
| | | | [R])cc1)═O |
| 57 | [chemical structure] | AEF(SP6PEG2PEG2g EC20OH) | C[N+](C)(CCNC(C OCCOCCNC(COC COCCNC(CC[C@ @H](C(O)═O)NC(C |
| | | | CCCCCCCCCCCC |
| | | | CCCCCC(O)═O)═ |
| | | | O)═O)═O)═O)CC |
| | | | (NCCOc1ccc(C[C |
| | | | @@H](C([R])═O) |
| | | | N[R])cc1)═O |
| 58 | [chemical structure] | AEF(SP6PEG6gEC18 OH) | C[N+](C)(CCNC(C COCCOCCOCCO CCOCCOCCNC(C C[C@@H](C(O)═ |
| | | | O)NC(CCCCCCC |
| | | | CCCCCCCCCC(O)═ |
| | | | O)═O)═O)═O)C |
| | | | C(NCCOc1ccc(C[C |
| | | | @@H](C([R])═O) |
| | | | N[R])cc1)═O |
| 59 | [chemical structure] | AEF(SP6PEG6gEC20 OH) | C[N+](C)(CCNC(C COCCOCCOCCO CCOCCOCCNC(C C[C@@H](C(O)═ |
| | | | O)NC(CCCCCCC |
| | | | CCCCCCCCCCCC |
| | | | (O)═O)═O)═O)═ |
| | | | O)CC(NCCOc1ccc |
| | | | (C[C@@H](C([R])═ |
| | | | O)N[R])cc1)═O |
| 60 | [chemical structure] | AEF(aPEG2a) | C[N+](C)(C)CCOC C[N+](C)(C)CCOc 1ccc(C[C@@H](C ([R])═O)N[R])cc1 |
| | C20H35N3O3R2+2 | | |
| 61 | [chemical structure] | k(PEG2gEC18OH), dK(PEG2gEC18OH) | OC(CCCCCCCCC CCCCCCCC(N[C @@H](CCC(NCC OCCOCC(NCCCC |
| | | | [C@H](C([R])═O) |
| | | | N[R])═O)═O)C |
| | | | (O)═O)═O)═O |
| 62 | [chemical structure] | k(PEG6gEC18OH), dK(PEG6gEC18OH) | OC(CCCCCCCCC CCCCCCCC(N[C @@H](CCC(NCC OCCOCCOCCOC |
| | | | COCCOCCC(NCC |
| | | | CC[C@H](C([R])═ |
| | | | O)N[R])═O)═O)C |
| | | | (O)═O)═O)═O |
| 63 | [chemical structure] | k(Sp6PEG2PEG2gEC18 OH), dK(Sp6PEG2PEG 2gEC18OH) | C[N+](C)(CCNC(C OCCOCCNC(COC COCCNC(CC[C@ @H](C(O)═O)NC(C |
| | | | CCCCCCCCCCCC |
| | | | CCCC(O)═O)═O)═ |
| | | | O)═O)═O)CC(NCCC |
| | | | C[C@H](C([R])═O) |
| | | | N[R])═O |
| 64 | [chemical structure] | APEG2F | C[N+](C)(C)CCOC COc1ccc(C[C@@ H](C([R])═O)N[R]) cc1 |
| | C16H25N2O3R2+ | | |
| 65 | [chemical structure] | APEG2ser | C[N+](C)(C)CCOC COC[C@@H](C ([R])═O)N[R] |
| | C10H21N2O3R2+ | | |
| 66 | [chemical structure] | APEG2Ser(R*) APEG2Ser(S*) | C[N+](C)(C)CCOC COCC(C([R])═O) N[R] |
| | C10H21N2O3R2+ | | |
| 67 | [chemical structure] | APEG3F | C[N+](C)(C)CCOC COCCOc1ccc(C[C @@H](C([R])═O) N[R])cc1 C[N+](C)(C)CCOC COCCOc1ccc(C[C @@H](C═O)N)cc1 |
| | C18H29N2O4R2+ | | |
| 68 | [chemical structure] | AcdPEG6CO | CC(NCCOCCOCC OCCOCCOCCOC CC([R])═O)═O |
| | C17H32NO8R | | |
| 69 | [chemical structure] | BiotinPEG4CO, Biotin(PEG4CO), Biotin(PEG4) | O═C(CCCC[C@@ H]([C@H]1N2)SC[C @@H]1NC2═O) NCCOCCOCCOC COCCC([R])═O |
| | C21H36N3O7SR | | |
| 70 | [chemical structure] | Biotinyl(dPEG2), Biotin(dPEG2) | O═C(CCCC[C@@ H]([C@H]1N2)SC[C @@H]1NC2═O)NCC OCCOCCC([R])═O |
| | C17H28N3O5SR | | |
| 71 | [chemical structure] | Biotinyl(dPEG3), Biotin(dPEG3) | O═C(CCCC[C@@ H]([C@H]1N2)SC[C @@H]1NC2═O) NCCOCCOCCOC CC([R])═O |
| | C19H32N3O6SR | | |
| 72 | [chemical structure] | BrAcdPEG12CO | O═C(CBr)NCCOC COCCOCCOCCO CCOCCOCCOCC |
| | | | OCCOCCOCCOC |
| | | | CC([R])═O |
| 73 | [chemical structure] | BrAcdPEG6CO | O═C(CBr)NCCOC COCCOCCOCCO CCOCCC([R])═O |
| | C17H31BrNO8R | | |
| 74 | [chemical structure] | BrAcdPEG9CO | O═C(CBr)NCCOC COCCOCCOCCO CCOCCOCCOCC |
| | | | OCCC([R])═O |
| 75 | [chemical structure] | C12gEPEG2PEG2, C12gEPEG2PEG2CO | CCCCCCCCCCCC (N[C@@H](CCC(NC COCCOCC(NCCOCC OCC([R])═O)═O)═ |
| | | | O)C(O)═O)═O |
| 76 | [chemical structure] | C14gEPEG2PEG2, C14gEPEG2PEG2CO | CCCCCCCCCCCC CC(N[C@@H](CCC (NCCOCCOCC(NC COCCOCC([R])═ |
| | | | O)═O)═O)C(O)═ |
| | | | O)═O |
| 77 | [chemical structure] | C18OHgEPEG12, HOC18gEPEG12 | OC(CCCCCCCCC CCCCCCCC(N[C @@H](CCC(NCC |
| | | | OCCOCCOCCOC |
| | | | COCCOCCOCCO |
| | | | CCOCCOCCOCC |
| | | | OCCC([R])═O)═O) |
| | | | C(O)═O)═O)═O |
| 78 | [chemical structure] | C18OHgEPEG2PEG2, HOC18gEPEG2PEG2 PEG2PEG2gEC18OH | OC(CCCCCCCCCC CCCCCCC(N[C@ @H](CCC(NCCOC COCC(NCCOCCO |
| | | | CC([R])═O)═O)═O) |
| | | | C(O)═O)═O)═O |
| | | | OC(CCCCCCCCC |
| | | | CCCCCCCC(N[C |
| | | | @@H](CCC(NCC |
| | | | OCCOCC(NCCOC |
| | | | COCC([R])═O)═O)═ |
| | | | O)C(O)═O)═O)═O |
| | | | OC(CCCCCCCCC |
| | | | CCCCCCCC(N[C |
| | | | @@H](CCC(NCC |
| | | | OCCOCC(NCCOC |
| | | | COCC═O)═O)═O) |
| | | | C(O)═O)═O)═O |
| 79 | [chemical structure] | C18OHgEPEG2PEG2 SP6, HOC18gEPEG2PE G2SP6 | C[N+](C)(CCNC(C OCCOCCNC(COC COCCNC(CC[C@ @H](C(O)═O)NC(C |
| | | | CCCCCCCCCCCC |
| | | | CCCC(O)═O)═O)═ |
| | | | O)═O)═O)CC([R])═ |
| | | | O |
| 80 | [chemical structure] | C18OHgEPEG2SP6PE G2, HOC18gEPEG2SP 6PEG2 | C[N+](C)(CCNC(C OCCOCCNC(CC[C @@H](C(O)═O)NC (CCCCCCCCCCC |
| | | | CCCCCC(O)═O)═ |
| | | | O)═O)═O)CC(NCC |
| | | | OCCOCC([R])═O)═ |
| | | | O |
| 81 | [chemical structure] | C18OHgEPEG6, HOC18gEPEG6 | OC(CCCCCCCCCC CCCCCCC(N[C@@ H](CCC(NCCOCCO |
| | | | CCOCCOCCOCCO |
| | | | CCC([R])═)═O)C |
| | | | O(O)═O)═O)═O |
| 82 | [chemical structure] | C20OHgEPEG2PEG2, HOC20gEPEG2PEG2 | OC(CCCCCCCCC CCCCCCCCCC(N[C @@H](CCC(NCCO CCOCC(NCCOCC |
| | | | OCC([R])═O)═O)═ |
| | | | O)C(O)═O)═O)═O |
| 83 | [chemical structure] | C20gEPEG2PEG2 | CCCCCCCCCCCC CCCCCCCC(N[C@ @H](CCC(NCCOC COCC(NCCOCCO |
| | | | CC([R])═O)═O)═O) |
| | | | C(O)═O)═O |
| 84 | [chemical structure] | CO(NHPEG3a) CON(PEG3a) CONHPEG3a | C[N+](C)(C)CCOC COCCNC([R])═O |
| | C10H22N2O3R+ | | |
| 85 | [chemical structure] | CO(PEG12gEC18OH) | OC(CCCCCCCCC CCCCCCCC(N[C @@H](CCC(NCC OCCOCCOCCOC |
| | | | COCCOCCOCCO |
| | | | CCOCCOCCOCC |
| | | | OCCNC([R])═O)═ |
| | | | O)C(O)═O)═O)═O |
| 86 | [chemical structure] | CO(PEG2PEG2gEC18 OH) | OC(CCCCCCCCCC CCCCCCC(N[C@ @H](CCC(NCCOC |
| | | | COCC(NCCOCCO |
| | | | CCNC([R])═O)═ |
| | | | O)═O)C(O)═O)═ |
| | | | O)═O |
| 87 | [chemical structure] | CO(mPEG8) | COCCOCCOCCO CCOCCOCCOCC OCCN[R] |
| | C17H36NO8R | | |
| 88 | [chemical structure] | CON(MePEG2) | CN(CCOCCOC)C ([R])═O |
| | C7H14NO3R | | |
| 89 | [chemical structure] | CONH(PEG3a) | C[N+](C)(C)CCOC COCCN[R] |
| | C9H22N2O2R+ | | |
| 90 | [chemical structure] | CONH(PEG5a) | C[N+](C)(C)CCOC COCCOCCOCCN C([R])═O |
| | C14H30N2O5R+ | | |
| 91 | [chemical structure] | CONH(mPEG2) | COCCOCCNC ([R])═O |
| | C6H12NO3R | | |
| 92 | [chemical structure] | PEG2PEG2gEC16OH | OC(CCCCCCCCC CCCCCC(N[C@@ H](CCC(NCCOCC OCC(NCCOCCOC |
| | | | C([R])═O)═O)═O) |
| | | | C(O)═O)═O)═O |
| | | | OC(CCCCCCCCC |
| | | | CCCCCC(N[C@@ |
| | | | H](CCC(NCCOCC |
| | | | OCC(NCCOCCOC |
| | | | C═O)═O)═O)C |
| | | | (O)═O)═O)═O |
| 93 | [chemical structure] | DOTA(dPEG2) | OC(CN1CCN(CC (O)═O)CCN(CC (O)═O)CCN(CC(NC COCCOCCC([R])═ O)═O)CC1)═O |
| | C23H40N5O10R | | |
| 94 | [chemical structure] | DOTA(dPEG3) | OC(CN1CCN(CC (O)═O)CCN(CC(O)═ O)CCN(CC(NCCOC COCCOCCC([R])═ O)═O)CC1)═O |
| | C25H44N5O11R | | |
| 95 | [chemical structure] | Dab(NMeCOmPEG6) | CN(CC[C@@H](C ([R])═O)N[R])C(C COCCOCCOCCOC COCCOC)═O |
| | C19H36N2O8R2 | | |
| 96 | [chemical structure] | Dab(NMecPEG2aCO), Dab(NMecPEG2a) | CN(CC[C@@H](C ([R])═O)N[R])C(CO CCOCC[N+](C)(C) C)═O |
| | C14H28N3O4R2+ | | |
| 97 | [chemical structure] | Dab(NMecPEG3aCO), Dab(NMecPEG3a) | CN(CC[C@@H](C ([R])═O)N[R])C(C COCCOCC[N+](C) (C)C)═O |
| | C15H30N3O4R2+ | | |
| 98 | [chemical structure] | Dab(NMecPEG5aCO), Dab(NMecPEG5a) | CN(CC[C@@H](C ([R])═O)N[R])C(C COCCOCCOCCO CC[N+](C)(C)C)═O |
| | C19H38N3O6R2+ | | |
| 99 | [chemical structure] | E(COcPEG3a)) | C[N+](C)(C)CCOC COCCNC(CC[C@ @H](C([R])═O)N [R])═O |
| | C14H28N3O4R2+ | | |
| 100 | [chemical structure] | F(4TzlDMA4mPEG) | C[N+](C)(CCCCc1 cn(-c2ccc(C[C@@H] (C([R])═O)N[R])cc 2)nn1)CCOC |
| | C20H30N5O2R2+ | | |
| 101 | [chemical structure] | FITCPEG4CO | Oc1cc(Oc2c(C3(c (cc4)c5cc4NC(NCC OCCOCCOCCOC CC([R])═O)═S)OC 5═O)ccc(O)c2)c3cc1 |
| | C32H33N2O10SR | | |
| 102 | [chemical structure] | FlagTag(dPEG2) | NCCCC[C@@H](C (NCCOCCOCCC ([R])═O)═O)NC([C @H](CC(O)═O)N |
| | | | C([C@H](CC(O)═ |
| | | | O)NC([C@H](CC |
| | | | (O)═O)NC([C@H] |
| | | | (CC(O)═O)NC([C@ |
| | | | H](CCCCN)NC([C |
| | | | @H](Cc(cc1)ccc1 |
| | | | O)NC([C@H] (CC |
| | | | (O)═O)N)═O)═O)═ |
| | | | O)═O)═O)═O)═O |
| 103 | [chemical structure] | FlagTag(dPEG3) | NCCCC[C@@H](C (NCCOCCOCCOC CC([R])═O)═O)NC ([C@H](CC(O)═O) |
| | | | NC([C@H] (CC(O)═ |
| | | | O)NC([C@H](CC |
| | | | (O)═O)NC([C@H] |
| | | | (CC(O)═O)NC([C |
| | | | @H](CCCCN)NC |
| | | | ([C@H](Cc(cc1)ccc1 |
| | | | O)NC([C@H](CC |
| | | | (O)═O)N)═O)═O)═ |
| | | | O)═O)═O)═O)═O |
| 104 | [chemical structure] | HOC10gEPEG2PEG2, HOC10gEPEG2PEG2 CO | OC(CCCCCCCCC (N[C@@H](CCC(N CCOCCOCC(NCCO CCOCC([R])═O)═ |
| | | | O)═O)C(O)═O)═ |
| | | | O)═O |
| | | | OC(CCCCCCCCC |
| | | | (N[C@@H](CCC(N |
| | | | CCOCCOCC(NCCO |
| | | | CCOCC═O)═O)═ |
| | | | O)C(O)═O)═O)═O |
| 105 | [chemical structure] | HOC16gEPEG2PEG2 orn, HOC16OHgEPEG 2PEG2orn(2) | OC(CCCCCCCCC CCCCCC(N[C@@ H](CCC(NCCOCC OCC(NCCOCCOC |
| | | | C(N[C@H](CCCN |
| | | | [R])C([R])═O)═ |
| | | | O)═O)═O)C(O)═ |
| | | | O)═O)═O |
| | | | NCCC[C@H](C═O) |
| | | | NC(COCCOCCNC |
| | | | (COCCOCCNC(CC |
| | | | [C@@H](C(O)═O) |
| | | | NC(CCCCCCCCC |
| | | | CCCCCC(O)═O) |
| | | | O)═O)═O)═O |
| 106 | [chemical structure] | K(BiotinPEG4) | O═C(CCCC[C@@ H]([C@H]1N2)SC[C @@H]1NC2═O) NCCOCCOCCOC COCCC(NCCCC[C @@H](C([R])═O) N[R])═O |
| | C27H47N5O8SR2 | | |
| 107 | [chemical structure] | K(FITCPEG4) | Oclcc(Oc2c(C3(c (cc4)c5cc4NC(NCC OCCOCCOCCOC CC(NCCCC[C@@ H](C([R])═O)N[R])═ O)═S)OC5═O)ccc (O)c2)c3cc1 |
| | C38H44N4O11SR2 | | |
| 108 | [chemical structure] | K(NMeCOPEG4N+ Me3) | CN(CCCC[C@@H] (C([R])═O)N[R])C (CCOCCOCCOCCO CC[N+](C)(C)C)═O |
| | C21H42N3O6R2+ | | |
| 109 | [chemical structure] | K(NMeCOmPEG6) | CN(CCCC[C@@H] (C([R])═O)N[R])C (CCOCCOCCOCC OCCOCCOC)═O |
| | C21H40N2O8R2 | | |
| 110 | [chemical structure] | K(NMePEG3a), K(NMecPEG3a), K(NMecPEG3aCO) | CN(CCCC[C@@H (C([R])═O)N[R])C (CCOCCOCC[N+] (C)(C)C)═O |
| | C17H34N3O4R2+ | | |
| 111 | [chemical structure] | K(NmPEG6Ac) | CC(N(CCCC[C@ @H](C([R])═O)N [R])CCOCCOCCO CCOCCOCCOC)═ O |
| | C21H40N2O8R2 | | |
| 112 | [chemical structure] | K(PEG12NMegENMe C18OH) | CN(CCOCCOCCOC COCCOCCOCCOC COCCOCCOCCOC COCCC(NCCCC[C |
| | | | @@H](C([R])═O) |
| | | | N[R])═O)C(CC[C |
| | | | @@H](C(O)═O)N |
| | | | (C)C(CCCCCCCC |
| | | | CCCCCCCCC |
| | | | (O)═O)═O)═O |
| 113 | [chemical structure] | K(PEG12NMegENMe C18 Tetrazole) | CN(CCOCCOCCO CCOCCOCCOCC OCCOCCOCCOC COCCOCCC(NCC |
| | | | CC[C@@H](C([R])═ |
| | | | O)N[R])═O)C(C |
| | | | C[C@@H](C(O)═ |
| | | | O)N(C)C(CCCCC |
| | | | CCCCCCCCCCCC |
| | | | c1nnn[nH]1)═O)═O |
| 114 | [chemical structure] | K(PEG12gEC18OH) | OC(CCCCCCCCC CCCCCCCC(N[C @@H](CCC(NCC OCCOCCOCCOC |
| | | | COCCOCCOCCO |
| | | | CCOCCOCCOCC |
| | | | OCCC(NCCCC[C |
| | | | @@H](C([R])═O) |
| | | | N[R])═O)═O)C |
| | | | (O)═O)═O)═O |
| 115 | [chemical structure] | K(PEG12gEC20OH) | OC(CCCCCCCCC CCCCCCCCCC(N [C@@H](CCC(NC COCCOCCOCCO |
| | | | CCOCCOCCOCC |
| | | | OCCOCCOCCOC |
| | | | COCCC(NCCCC[C |
| | | | @@H](C([R])═O) |
| | | | N[R])═O)═O)C |
| | | | (O)═O)═O)═O |
| 116 | [chemical structure] | K(PEG24C18OH) | OC(CCCCCCCCC CCCCCCCC(NCC OCCOCCOCCOC COCCOCCOCCO |
| | | | CCOCCOCCOCC |
| | | | OCCOCCOCCOC |
| | | | COCCOCCOCCO |
| | | | CCOCCOCCOCC |
| | | | OCCOCCC(NCC |
| | | | CC[C@@H](C |
| | | | ([R])═O)N[R])═ |
| | | | O)═O)═O |
| 117 | [chemical structure] | K(PEG24gEC16OH) | OC(CCCCCCCCC CCCCCC(N[C@@ H](CCC(NCCOCC OCCOCCOCCOC |
| | | | COCCOCCOCCO |
| | | | CCOCCOCCOCC |
| | | | OCCOCCOCCOC |
| | | | COCCOCCOCCO |
| | | | CCOCCOCCOCC |
| | | | OCCC(NCCCC[C |
| | | | @@H](C([R])═O) |
| | | | N[R])═O)═O)C |
| | | | (O)═O)═O)═O |
| 118 | [chemical structure] | K(PEG24gEC18OH) | C[C@](CCCCNC (CCOCCOCCOCC OCCOCCOCCOC COCCOCCOCCO |
| | | | CCOCCOCCOCC |
| | | | OCCOCCOCCOC |
| | | | COCCOCCOCCO |
| | | | CCOCCOCCNC(C |
| | | | C[C@@H](C(O)═ |
| | | | O)NC(CCCCCCC |
| | | | CCCCCCCCCC |
| | | | (O)═O)═O)═O)═ |
| | | | O)(C([R])═O)N[R] |
| 119 | [chemical structure] | K(PEG2NMePEG2NM egENMeC18OH) | CN(CCOCCOCCN ((C)CCOCCOCC(N CCCC[C@@H](C ([R])═O)N[R])═O)═ |
| | | | O)C(CC[C@@H](C |
| | | | (O)═O)N(C)C(CCC |
| | | | CCCCCCCCCCCC |
| | | | CC(O)═O═O)═O |
| 120 | [chemical structure] | K(PEG2NMePEG2NM egENMeC18Tetrazole) | CN(CCOCCOCC(N (C)CCOCCOCC(N CCCC[C@@H](C ([R])═O)N[R])═O)═ |
| | | | O)C(CC[C@@H](C |
| | | | (O)═O)N(C)C(CCC |
| | | | CCCCCCCCCCCC |
| | | | CCc1nnn[nH]1)═ |
| | | | O)═O |
| 121 | [chemical structure] | K(PEG2PEG2Biotin) | O═C(CCCC[C@@ H]([C@H]1N2)SC[C @@H]1NC2═O) NCCOCCOCC(NC COCCOCC(NCCC C[C@@H](C([R])═ O)N[R])═O)═O |
| | C28H48N6O9SR2 | | |
| 122 | [chemical structure] | K(PEG2PEG2C16OH) | OC(CCCCCCCCC CCCCCC(NCCOC COCC(NCCOCCO CC(NCCCC[C@@ |
| | | | H](C([R])═O)N[R])═ |
| | | | O)═O)═O)═O |
| 123 | [chemical structure] | K(PEG2PEG2C18OH) | OC(CCCCCCCCC CCCCCCCC(NCCO CCOCC(NCCOCCO CC(NCCCC[C@@ |
| | | | H](C([R])═O)N[R])═ |
| | | | O)═O)═O)═O |
| 124 | [chemical structure] | K(PEG2PEG2DgEC18 OH) | OC(CCCCCCCCC CCCCCCCC(N[C @H](CCC(NCCO CCOCC(NCCOCC |
| | | | OCC(NCCCC[C@ |
| | | | @H](C([R])═O)N |
| | | | [R])═O)═O)═O)C |
| | | | (O)═O)═O)═O |
| 125 | [chemical structure] | K(PEG2PEG2PC18OH) | OC(CCCCCCCCC CCCCCCCC(N(C CC1)[C@@H]1C(N CCOCCOCC(NCC |
| | | | OCCOCC(NCCCC |
| | | | [C@@H](C([R])═ |
| | | | O)N[R])═O)═O)═ |
| | | | O)═O)═O |
| 126 | [chemical structure] | K(PEG2PEG2PPPC18 OH) | OC(CCCCCCCCC CCCCCCCC(N(C CC1)[C@@H]1C(N (CCC1)[C@@H] |
| | | | 1C(N(CCC1)[C@ |
| | | | @H]1C(NCCOCC |
| | | | OCC(NCCOCCOC |
| | | | C(NCCCC[C@@H] |
| | | | (C([R])═O)N[R])═ |
| | | | O)═O)═O)═O)═ |
| | | | O)═O)═O |
| 127 | [chemical structure] | K(PEG2PEG2PPPgEC 18OH) | OC(CCCCCCCCCCC CCCCCC(N[C@@ H](CCC(N(CCC1) [C@@H]1C(N(CC C1)[C@@H]1C(N(C CC1)[C@@H]1C(NC COCCOCC(NCCOC COCC(NCCCC[C @@H](C([R])═O)N [R])═O)═O)═O)═ O)═O)═O)C(O)═ O)═O)═O |
| | C56H94N8O16R2 | | |
| 128 | [chemical structure] | K(PEG2PEG2PgEC18 OH) | OC(CCCCCCCCC CCCCCCCC(N[C @@H](CCC(N(CC C1)[C@@H]1C(N |
| | | | CCOCCOCC(NCC |
| | | | OCCOCC(NCCCC |
| | | | [C@@H](C([R])═O) |
| | | | N[R])═O)═O)═O)═ |
| | | | O)C(O)═O)═O)═O |
| 129 | [chemical structure] | K(PEG2PEG2Sp6gEC18 OH) | C[N+](C)(CCNC(C C[C@@H](C(O)═ O)NC(CCCCCCCC CCCCCCCCC(O)═ |
| | | | O)═O)═O)CC(N |
| | | | CCOCCOCC(NCC |
| | | | OCCOCC(NCCCC |
| | | | [C@@H](C([R])═O) |
| | | | N[R])═O)═O)═O |
| 130 | [chemical structure] | K(PEG2PEG2TrxgEC18 OH) | OC(CCCCCCCCC CCCCCCCC(N[C@ @H](CCC(NC[C@ H](CC1)CC[C@@ |
| | | | H]1C(NCCOCCOC |
| | | | C(NCCOCCOCC(N |
| | | | CCCC[C@@H](C |
| | | | ([R])═O)N[R])═O)═ |
| | | | O)═O)═O)C(O)═ |
| | | | O)═O)═O |
| 131 | [chemical structure] | K(PEG2PEG2TrxgEC20 OH) | OC(CCCCCCCCC CCCCCCCCCC(N [C@@H](CCC(NC [C@H](CC1)CC[C |
| | | | @@H]1C(NCCOC |
| | | | COCC(NCCOCCO |
| | | | CC(NCCCC[C@@ |
| | | | H](C([R])═O)N[R])═ |
| | | | O)═O)═O)═O)C |
| | | | (O)═O)═O)═O |
| 132 | [chemical structure] | K(PEG2PEG2TrxgETrx C20OH) | OC(CCCCCCCCC CCCCCCCCCC(N C[C@H](CC1)CC[C @@H]1C(N[C@ |
| | | | @H](CCC(NC[C@ |
| | | | H](CC1)CC[C@H] |
| | | | 1C(NCCOCCOCC(N |
| | | | CCOCCOCC(NCCC |
| | | | C[C@@H] (C([R])═ |
| | | | O)N[R])═O)═O)═ |
| | | | O)═O)C(O)═O)═ |
| | | | O)═O)═O |
| 133 | [chemical structure] | K(PEG2PEG2gEC10 OH) | OC(CCCCCCCCC (N[C@@H](CCC(N CCOCCOCC(NCCO CCOCC(NCCCC[C |
| | | | @@H](C([R])═O)N |
| | | | [R])═O)═O)═O)C |
| | | | (O)═O)═O)═O |
| 134 | [chemical structure] | K(PEG2PEG2gEC12) | CCCCCCCCCCCC (N[C@@H](CCC(N CCOCCOCC(NCCO CCOCC(NCCCC[C |
| | | | @@H](C([R])═O) |
| | | | N[R])═O)═O)═O)C |
| | | | (O)═O)═O |
| 135 | [chemical structure] | K(PEG2PEG2gEC14) NMeK(PEG2PEG2gEC 14) | CCCCCCCCCCCC CC(N[C@@H](CCC (NCCOCCOCC(N CCOCCOCC(NCCC |
| | | | C[C@@H](C([R])═ |
| | | | O)N[R])═O)═O)═O) |
| | | | C(O)═O)═O |
| 136 | [chemical structure] | K(PEG2PEG2gEC16) | CCCCCCCCCCCC CCCC(N[C@@H](C CC(NCCOCCOCC(N CCOCCOCC(NCCC |
| | | | C[C@@H](C([R])═ |
| | | | O)N[R])═O)═O)═ |
| | | | O)C(O)═O)═O |
| 137 | [chemical structure] | K(PEG2PEG2gEC16 OH) | OC(CCCCCCCCCC CCCCC(N[C@@H] (CCC(NCCOCCOC C(NCCOCCOCC(N |
| | | | CCCC[C@@H](C |
| | | | ([R])═O)N[R])═O)═ |
| | | | O)═O)C(O)═O)═ |
| | | | O)═O |
| 138 | [chemical structure] | K(PEG2PEG2gEC16 tetrazole) | OC([C@H](CCC(N CCOCCOCC(NCCO CCOCC(NCCCC[C @@H](C([R])═O)N |
| | | | [R])═O)═O)═O)NC |
| | | | (CCCCCCCCCCCC |
| | | | CCCc1nnn[nH]1)═ |
| | | | O)═O |
| 139 | [chemical structure] | K(PEG2PEG2gEC18) | CCCCCCCCCCCCC CCCCC(N[C@@H] (CCC(NCCOCCOC C(NCCOCCOCC(N |
| | | | CCCC[C@@H](C |
| | | | ([R])═O)N[R])═O)═ |
| | | | O)═O)C(O)═O)═O |
| 140 | [chemical structure] | K(PEG2PEG2gEC18 tetrazole) | OC([C@H](CCC(NC COCCOCC(NCCOC COCC(NCCCC[C@ @H](C([R])═O)N |
| | | | [R])═O)═O)═O)NC |
| | | | (CCCCCCCCCCCC |
| | | | CCCCCc1nnn[nH] |
| | | | 1)═O)═O |
| 141 | [chemical structure] | K(PEG2PEG2gEC20 OH) | OC(CCCCCCCCC CCCCCCCCCC(N [C@@H](CCC(NC COCCOCC(NCCO |
| | | | CCOCC(NCCCC[C |
| | | | @@H](C([R])═O) |
| | | | N[R])═O)═O)═O) |
| | | | C(O)═O)═O)═O |
| 142 | [chemical structure] | KPEG2PEG2gEDap(C 16OH)2, K(PEG2PEG2g EDAP(C16OH)2) | OC(CCCCCCCCCCC CCCC(NC[C@@H] (C(N[C@@H](CCC (NCCOCCOCC(NC |
| | | | COCCOCC(NCCCC |
| | | | [C@@H](C([R])═O) |
| | | | N[R])═O)═O)═O) |
| | | | C(O)═O)═O)NC(CC |
| | | | CCCCCCCCCCCC |
| | | | C(O)═O)═O)═O)═ |
| | | | O |
| 143 | [chemical structure] | K(PEG2PEG2gEDAP (mXOH)2) KPEG2PEG2gEDAP (mXOH)2 | OC([C@H](CCC(NC COCCOCC(NCCOC COCC(NCCCC[C@ @H](C([R])═O)N |
| | | | [R])═O)═O)═O)N |
| | | | C([C@H](CNC(C |
| | | | CCCCCCCCOc1cc |
| | | | (C(O)═O)ccc1)═O) |
| | | | NC(CCCCCCCCC |
| | | | Oc1cc(C(O)═O) |
| | | | ccc1)═O)═O)═O |
| 144 | [chemical structure] | K(PEG2PEG2gEDAP (pXOH)2) KPEG2PEG2gEDAP (pXOH)2 | OC([C@H](CCC(NC COCCOCC(NCCOC COCC(NCCCC[C@ @H](C([R])═O)N |
| | | | [R])═O)═O)═O)NC |
| | | | ([C@H](CNC(CCC |
| | | | CCCCCCOc(cc1)ccc |
| | | | 1C(O)═O)═O)NC(C |
| | | | CCCCCCCCOc(cc1) |
| | | | ccc1C(O)═O)═O)═ |
| | | | O)═O |
| 145 | [chemical structure] | K(PEG2PEG2gESp6C 18OH) | C[N+](C)(CCNC(CC CCCCCCCCCCCCC CC(O)═O)═O)CC(N [C@@H](CCC(NCC |
| | | | OCCOCC(NCCOCC |
| | | | OCC(NCCCC[C@@ |
| | | | H](C([R])═O)N[R])═ |
| | | | O)═O)═O)C(O)═ |
| | | | O)═O |
| 146 | [chemical structure] | K(PEG2PEG2gETrxC18 OH) | OC(CCCCCCCCCC CCCCCCC(NC[C@ H](CC1)CC[C@@H] 1C(N[C@@H](CCC |
| | | | (NCCOCCOCC(NC |
| | | | COCCOCC(NCCC |
| | | | C[C@@H](C([R])═ |
| | | | O)N[R])═O)═O)═ |
| | | | O)C(O)═O)═O)═ |
| | | | O)═O |
| 147 | [chemical structure] | K(PEG2PEG2gETrxC20 OH) | OC(CCCCCCCCCC CCCCCCCCC(NC [C@H](CC1)CC[C@ @H]1C(N[C@@H] |
| | | | (CCC(NCCOCCOC |
| | | | C(NCCOCCOCC(N |
| | | | CCCC[C@@H](C |
| | | | ([R])═O)N[R])═O)═ |
| | | | O)═O)C(O)═O)═ |
| | | | O)═O)═O |
| 148 | [chemical structure] | K(PEG2PEG2gEmXOH) | OC([C@H](CCC(N CCOCCOCC(NCC OCCOCC(NCCCC [C@@H](C([R])═ |
| | | | O)N[R])═O)═O)═ |
| | | | O)NC(CCCCCCC |
| | | | CCOc1cc(C(O)═O) |
| | | | ccc1)═O)═O |
| 149 | [chemical structure] | K(PEG2PEG2gEpXOH) | OC([C@H](CCC(NC COCCOCC(NCCO CCOCC(NCCCC[C @@H](C([R])═O)N |
| | | | [R])═O)═O)═O)NC |
| | | | (CCCCCCCCCOc |
| | | | (cc1)ccc1C(O)═O)═ |
| | | | O)═O |
| 150 | [chemical structure] | K(PEG2PEG2pC18OH) | OC(CCCCCCCCCC CCCCCCC(N(CCC 1)[C@H]1C(NCCO CCOCC(NCCOCCO |
| | | | CC(NCCCC[C@@ |
| | | | H](C([R])═O)N |
| | | | [R])═O)═O)═O)═ |
| | | | O)═O |
| 151 | [chemical structure] | K(PEG2PEG2pgEC18 OH) | OC(CCCCCCCCC CCCCCCCC(N[C @@H](CCC(N(CC C1)[C@H]1C(NC |
| | | | COCCOCC(NCCO |
| | | | CCOCC(NCCCC[C |
| | | | @@H](C([R])═O)N |
| | | | [R])═O)═O)═O)═ |
| | | | O)C(O)═O)═O)═O |
| 152 | [chemical structure] | K(PEG2PEG2pppC18 OH) | OC(CCCCCCCCCC CCCCCCC(N(CCC 1)[C@H]1C(N(CC C1)[C@H]1C(N(C |
| | | | CC1)[C@H]1C(NC |
| | | | COCCOCC(NCCO |
| | | | CCOCC(NCCCC[C |
| | | | @@H](C([R])═O)N |
| | | | [R])═O)═O)═O)═ |
| | | | O)═O)═O)═O |
| 153 | [chemical structure] | K(PEG2PEG2pppgEC 18OH) | OC(CCCCCCCCCCC CCCCCC(N[C@@H] (CCC(N(CCC1)[C@ H]1C(N(CCC1)[C@ |
| | | | H]1C(N(CCC1)[C |
| | | | @H]1C(NCCOCCO |
| | | | CC(NCCOCCOCC |
| | | | (NCCCC[C@@H](C |
| | | | ([R])═O)N[R])═O)═ |
| | | | O)═O)═O)═O)═O) |
| | | | C(O)═O)═O)═O |
| 154 | [chemical structure] | K(PEG2PEG6gEC16 OH) | OC(CCCCCCCCCC CCCCC(N[C@@H] (CCC(NCCOCCOC COCCOCCOCCOC |
| | | | CC(NCCOCCOCC |
| | | | (NCCCC[C@@H] |
| | | | (C([R])═O)N[R])═ |
| | | | O)═O)═O)C(O)═ |
| | | | O)═O)═O |
| 155 | [chemical structure] | K(PEG2PEG6gEC18 OH) | OC(CCCCCCCCCC CCCCCCC(N[C@@ H](CCC(NCCOCCO CCOCCOCCOCCO |
| | | | CCC(NCCOCCOC |
| | | | C(NCCCC[C@@H] |
| | | | (C([R])═O)N[R])═ |
| | | | O)═O)═O)C(O)═ |
| | | | O)═O)═O |
| 156 | [chemical structure] | K(PEG2Sp6PEG2gEC 18OH) | C[N+](C)(CCNC(C OCCOCCNC(CC[C @@H](C(O)═O)NC (CCCCCCCCCCCC |
| | | | CCCCC(O)═O)═ |
| | | | O)═O)═O)CC(NCC |
| | | | OCCOCC(NCCCC |
| | | | [C@@H](C([R])═ |
| | | | O)N[R])═O)═O |
| 157 | [chemical structure] | K(PEG2gEC16OH) | OC(CCCCCCCCCC CCCCC(N[C@@H] (CCC(NCCOCCOC C(NCCCC[C@@H] |
| | | | (C([R])═O)N[R])═ |
| | | | O)═O)C(O)═O)═ |
| | | | O)═O |
| 158 | [chemical structure] | K(PEG2gEC18OH) | OC(CCCCCCCCCC CCCCCCC(N[C@@ H](CCC(NCCOCC OCC(NCCCC[C@ |
| | | | @H](C([R])═O)N |
| | | | [R])═O)═O)C(O)═ |
| | | | O)═O)═O |
| 159 | [chemical structure] | K(PEG2gEgEPEG24S BC16Tetrazole) | OC([C@H](CCC(NC COCCOCC(NCCCC [C@@H](C([R])═O) N[R])═O)═O)NC(CC |
| | | | [C@@H](C(O)═O)N |
| | | | C(COCCOCCNC(CC |
| | | | CS(NC(CCCCCCCC |
| | | | CCCCCCCc1nnn[nH] |
| | | | 1)═O)(═O)═O)═ |
| | | | O)═O)═O)═O |
| 160 | [chemical structure] | K(PEG3OMe) K(mPEG4) | COCCOCCOCCOC CC(NCCCC[C@@H] (C([R])═O)N[R])═O |
| | C16H30N2O6R2 | | |
| 161 | [chemical structure] | K(PEG4Biotina), K(PEG4Biotin) | O═C(CCCC[C@H] ([C@@H]1N2)SC[C @H]1NC2═O)NCC OCCOCCOCCOCC C(NCCCC[C@@H] (C([R])═O)N[R])═O |
| | C27H47N5O8SR2 | | |
| 162 | [chemical structure] | K(PEG6Biotin) | O═C(CCCC[C@@H] ([C@H]1N2)SC[C@ @H]1NC2═O)NCCO CCOCCOCCOCCOC COCCC(NCCCC[C@ @H](C([R])═O)N [R])═O |
| | C31H55N5O10SR2 | | |
| 163 | [chemical structure] | K(PEG6PEG6gEC16 OH) | OC(CCCCCCCCCC CCCCC(N[C@@H] (CCC(NCCOCCOC COCCOCCOCCOC |
| | | | CC(NCCOCCOCCO |
| | | | CCOCCOCCOCCC |
| | | | (NCCCC[C@@H](C |
| | | | ([R])═O)N[R])═O)═ |
| | | | O)═O)C(O)═O)═ |
| | | | O)═O |
| 164 | [chemical structure] | K(PEG6PEG6gEC18 OH) | OC(CCCCCCCCCC CCCCCCC(N[C@@ H](CCC(NCCOCCO CCOCCOCCOCCO |
| | | | CCC(NCCOCCOCC |
| | | | OCCOCCOCCOCC |
| | | | C(NCCCC[C@@H] |
| | | | (C([R])═O)N[R])═ |
| | | | O)═O)═O)C(O)═ |
| | | | O)═O)═O |
| 165 | [chemical structure] | K(PEG6gEC16OH) | OC(CCCCCCCCCC CCCCC(N[C@@H] (CCC(NCCOCCOC COCCOCCOCCOC |
| | | | CC(NCCCC[C@@ |
| | | | H](C([R])═O)N |
| | | | [R])═O)═O)C(O)═ |
| | | | O)═O)═O |
| 166 | [chemical structure] | K(PEG6gEC18OH) | OC(CCCCCCCCCC CCCCCCC(N[C@@ H](CCC(NCCOCCO CCOCCOCCOCCOC |
| | | | CC(NCCCC[C@@H] |
| | | | (C([R])═O)N[R])═ |
| | | | O)═O)C(O)═O)═ |
| | | | O)═O |
| 167 | [chemical structure] | K(Sp6PEG2PEG2gEC 18OH) | C[N+](C)(CCNC(CO CCOCCNC(COCCO CCNC(CC[C@@H] (C(O)═O)NC(CCC |
| | | | CCCCCCCCCCCCC |
| | | | C(O)═O)═O)═O)═ |
| | | | O)═O)CC(NCCCC |
| | | | [C@@H](C([R])═O) |
| | | | N[R])═O |
| 168 | [chemical structure] | K(cPEG3a), K(cPEG3aCO) | C[N+](C)(C)CCOCC OCCC(NCCCC[C@ @H](C([R])═O)N [R])═O |
| | C16H32N3O4R2+ | | |
| 169 | [chemical structure] | K(dPEG12Ac) | CC(NCCOCCOCCO CCOCCOCCOCCOC COCCOCCOCCOCC OCCC(NCCCC[C@ |
| | | | @H](C([R])═O)N |
| | | | [R])═O)═O |
| 170 | [chemical structure] | K(dPEG12AcBr) | O═C(CCOCCOCCO CCOCCOCCOCCO CCOCCOCCOCCO CCOCCNC(CBr)═ |
| | | | O)NCCCC[C@@H] |
| | | | (C([R])═O)N[R] |
| 171 | [chemical structure] | K(dPEG6Ac) | CC(NCCOCCOCCO CCOCCOCCOCCC (NCCCC[C@@H](C ([R])═O)N[R])═ |
| | | | O)═O |
| 172 | [chemical structure] | K(dPEG6AcBr) | O═C(CCOCCOCCO CCOCCOCCOCCN C(CBr)═O)NCCCC [C@@H](C([R])═O) |
| | | | N[R] |
| 173 | [chemical structure] | K(dPEG9Ac) | CC(NCCOCCOCCO CCOCCOCCOCCO CCOCCOCCC(NCC CC[C@@H](C([R])═ |
| | | | O)N[R])═O)═O |
| 174 | [chemical structure] | K(dPEG9AcBr) | O═C(CCOCCOCCO CCOCCOCCOCCOC COCCOCCNC (CBr)═O)NCCCC[C |
| | | | @@H](C([R])═O)N |
| | | | [R] |
| 175 | [chemical structure] | K(mPEG12) | COCCOCCOCCOC COCCOCCOCCOC COCCOCCOCCOC CC(NCCCC[C@@ |
| | | | H](C([R])═O)N |
| | | | [R])═O |
| 176 | [chemical structure] | PEG2PEG2gEC18 | CCCCCCCCCCCCC CCCCC(N[C@@H] (CCC(NCCOCCOC C(NCCOCCOCC |
| | | | ([R])═O)═O)═O)C |
| | | | (O)═O)═O |
| | | | CCCCCCCCCCCCC |
| | | | CCCCC(N[C@@H] |
| | | | (CCC(NCCOCCOC |
| | | | C(NCCOCCOCC═ |
| | | | O)═O)═O)C(O)═ |
| | | | O)═O |
| 177 | [chemical structure] | Lys(N+Me2mPEG3) | C[N+](C)(CCCC[C @@H](C([R])═O)N [R])CCOCCOC |
| | C13H27N2O3R2+ | | |
| 178 | [chemical structure] | LysQuatMe2mPEG3, Lys(N+(Me)2mPEG3) | C[N+](C)(CCCC[C@ @H](C═O)N)CCOC COC |
| | C13H29N2O3+ | | |
| 180 | [chemical structure] | N(PEG2PEG2gEC18 OH)Gly | OC(CCCCCCCCCC CCCCCCC(N[C@@ H](CCC(NCCOCCO CC(NCCOCCOCCN |
| | | | (CC([R])═O)[R])═ |
| | | | O)═O)C(O)═O)═ |
| | | | O)═O |
| 181 | [chemical structure] | NMeK(PEG12C18OH) | CN([C@@H](CCCC NC(CCOCCOCCOC COCCOCCOCCOC COCCOCCOCCOC |
| | | | COCCNC(CCCCCC |
| | | | CCCCCCCCCCC |
| | | | (O)═O)═O)═O)C |
| | | | ([R])═O)[R] |
| 182 | [chemical structure] | NMeK(PEG12gEC18 OH) | CN([C@@H](CCCC NC(CCOCCOCCOC COCCOCCOCCOCC OCCOCCOCCOCCO |
| | | | CCNC(CC[C@@H] |
| | | | (C(O)═O)NC(CCC |
| | | | CCCCCCCCCCCC |
| | | | CC(O)═O)═O)═ |
| | | | O)═O)C([R])═O)[R] |
| 183 | [chemical structure] | NMeK(PEG2NMePEG 2NMegENMeC18OH) | CN(CCOCCOCC(N (C)CCOCCOCC(NC CCC[C@@H](C ([R])═O)N(C)[R])═ |
| | | | O)═O)C(CC[C@@ |
| | | | H](C(O)═O)N(C)C |
| | | | (CCCCCCCCCCCC |
| | | | CCCCC(O)═O)═ |
| | | | O)═O) |
| 184 | [chemical structure] | NMeK(PEG2PEG2C12) | CCCCCCCCCCCC(N CCOCCOCC(NCCO CCOCC(NCCCC[C@ @H](C([R])═O)N(C) |
| | | | [R])═O)═O)═O |
| 185 | [chemical structure] | NMeK(PEG2PEG2gE C12) | CCCCCCCCCCCC(N [C@@H](CCC(NCC OCCOCC(NCCOCC OCC(NCCCC[C@@ |
| | | | H](C([R])═O)N(C) |
| | | | [R])═O)═O)═O)C |
| | | | (O)═O)═O |
| 186 | [chemical structure] | NMeK(PEG2PEG2gEC 16OH) | CN([C@@H](CCCC NC(COCCOCCNC (COCCOCCNC(CC [C@@H](C(O)═O) |
| | | | NC(CCCCCCCCC |
| | | | CCCCCC(O)═O)═ |
| | | | O)═O)═O)═O)C |
| | | | ([R])═O)[R] |
| 187 | [chemical structure] | NMeK(PEG2PEG2gEC 18OH) | CN([C@@H](CCCC NC(COCCOCCNC(C OCCOCCNC(CC[C @@H](C(O)═O)NC |
| | | | (CCCCCCCCCCCC |
| | | | CCCCC(O)═O)═ |
| | | | O)═O)═O)═O)C |
| | | | ([R])═O)[R] |
| 188 | [chemical structure] | NMeK(PEG2PEG2gEC 20OH) | CN([C@@H](CCCC NC(COCCOCCNC (COCCOCCNC(CC [C@@H](C(O)═ |
| | | | O)NC(CCCCCCC |
| | | | CCCCCCCCCCCC |
| | | | (O)═O)═O)═O)═ |
| | | | O)═O)C([R])═O)[R] |
| 189 | [chemical structure] | NMeK(PEG6C18OH) | CN([R])[R](CCCCN C(CCOCCOCCOCC OCCOCCOCCNC(C CCCCCCCCCCCC |
| | | | CCCC(O)═O)═ |
| | | | O)═O)C([R])═O |
| 190 | [chemical structure] | NMeK(PEG6gEC18OH) | CN([C@@H](CCCC NC(CCOCCOCCOC COCCOCCOCCNC (CC[C@@H](C(O)═ |
| | | | O)NC(CCCCCCCC |
| | | | CCCCCCCCC(O)═ |
| | | | O)═O)═O)═O)C |
| | | | ([R])═O)[R] |
| 191 | [chemical structure] | NMeK(SP6PEG2gEC18 OH) | CN([C@@H](CCCC NC(C[N+](C)(C)CC NC(COCCOCCNC(C C[C@@H](C(O)═O) |
| | | | NC(CCCCCCCCC |
| | | | CCCCCCCC(O)═ |
| | | | O)═O)═O)═O)═O)C |
| | | | ([R])═O)[R] |
| 192 | [chemical structure] | PEG12gEC18OH | OC(CCCCCCCCCC CCCCCCC(N[C@@ H](CCC(NCCOCCO CCOCCOCCOCCO |
| | | | CCOCCOCCOCCO |
| | | | CCOCCOCCC(N |
| | | | [R])═O)═O)C(O)═ |
| | | | O)═O)═O |
| 193 | [chemical structure] | PEG12gEC20OH | OC(CCCCCCCCCC CCCCCCCCC(N[C @@H](CCC(NCCO CCOCCOCCOCCO |
| | | | CCOCCOCCOCCO |
| | | | CCOCCOCCOCCC |
| | | | (N[R])═O)═O)C(O)═ |
| | | | O)═O)═O |
| 194 | [chemical structure] | PEG2, PEG2(2) | O═C(COCCOCCN [R])[R] |
| | C6H11NO3R2 | | |
| 195 | [chemical structure] | PEG2(NMe(2)) PEG2NMe | CN(CCOCCOCC ([R])═O)[R] |
| | C7H13NO3R2 | | |
| 196 | [chemical structure] | PEG2PEG2eKC16OH | OC(CCCCCCCCCC CCCCC(N[C@@H] (CCCCNC(COCCOC CNC(COCCOCCN |
| | | | [R])═O)═O)C(O)═ |
| | | | O)═O)═O |
| | | | NCCOCCOCC(NC |
| | | | COCCOCC(NCCC |
| | | | C[C@@H](C(O)═ |
| | | | O)NC(CCCCCCC |
| | | | CCCCCCCC(O)═ |
| | | | O)═O)═O)═O |
| 197 | [chemical structure] | PEG2PEG2eKC18OH | OC(CCCCCCCCCC CCCCCCC(N[C@@ H](CCCCNC(COCC |
| | | | OCCNC(COCCOC |
| | | | CN[R])═O)═O))C |
| | | | (O)═O)═O)═O |
| | | | NCCOCCOCC(NC |
| | | | COCCOCC(NCCC |
| | | | C[C@@H](C(O)═O) |
| | | | NC(CCCCCCCCCC |
| | | | CCCCCCC(O)═O)═ |
| | | | O)═O)═O |
| 198 | [chemical structure] | PEG2PEG2gDabC18OH | OC(CCCCCCCCCC CCCCCCC(N[C@@ H](CCNC(COCCOC |
| | | | CNC(COCCOCCN |
| | | | [R])═O)═O)C(O)═ |
| | | | O)═O)═O |
| | | | NCCOCCOCC(NC |
| | | | COCCOCC(NCC[C |
| | | | @@H](C(O)═O)NC |
| | | | (CCCCCCCCCCCC |
| | | | CCCCC(O)═O)═ |
| | | | O)═O)═O |
| 199 | [chemical structure] | PEG2PEG2gEC20OH | OC(CCCCCCCCCC CCCCCCCCC(N[C @@H](CCC(NCCO |
| | | | CCOCC(NCCOCCO |
| | | | CC(N[R])═O)═O)═ |
| | | | O)C(O)═O)═O)═O |
| 200 | [chemical structure] | PEG6 | O═C(CCOCCOCCO CCOCCOCCOCCN [R])[R] |
| | C15H29NO7R2 | | |
| 201 | [chemical structure] | Peg12-Ome Peg12OMe, Polyethylene12-O-Methyl | COCCOCCOCCOC COCCOCCOCCOC COCCOCCOCCOC |
| | | Peg12-O-methyl | CC═O |
| 202 | [chemical structure] | Peg120Me, Peg12- Omethyl | CCOCCOCCOCCOC COCCOCCOCCOCC OCCOCCOC |
| 203 | [chemical structure] | Pip(PEG12gEC16), Spiral_Pip_PEG12_Iso Glu_Palm | CCCCCCCCCCCCC CCC(N[C@@H](CC C(NCCOCCOCCOC COCCOCCOCCOC |
| | | | COCCOCCOCCOC |
| | | | COCCC(N(CC1)CC |
| | | | C1(C([R])═O)N[R])═ |
| | | | O)═O)C(O)═O)═O |
| 204 | [chemical structure] | TMAPF(PEG2PEG2gE C18OH) | C[N+](C)(CCCCCO c1ccc(C[C@@H](C ([R])═O)N[R])cc1)C COCCOCCNC(CO |
| | | | CCOCCNC(CC[C@ |
| | | | @H](C(O)═O)NC(C |
| | | | CCCCCCCCCCCC |
| | | | CCCC(O)═O)═O)═ |
| | | | O)═O |
| 205 | [chemical structure] | Tzl(PEG3OH) | OCCOCCOCCn1nnc (C[C@@H](C([R])═ O)N[R])c1 |
| | C11H18N4O4R2 | | |
| 206 | [chemical structure] | Tzl(mPEG3) | COCCOCCOCCn1nn c(C[C@@H](C([R])═ O)N[R])c1 |
| | C12H20N4O4R2 | | |
| 207 | [chemical structure] | TzlChmPEG | C[N+](C)(CCclcn(C [C@@H](C([R])═O) N[R])nn1)CCOC |
| | C12H22N5O2R2+ | | |
| 208 | [chemical structure] | TzlChmPEG3 | C[N+](C)(CCclcn(C [C@@H](C([R])═O) N[R])nn1)CCOCCO CCOC |
| | C16H30N5O4R2+ | | |
| 209 | [chemical structure] | Y(OTzl(mPEG3)) | COCCOCCOCCn1nn c(COc2ccc(C[C@@ H](C([R])═O)N[R])c c2)c1 |
| | C19H26N4O5R2 | | |
| 210 | [chemical structure] | Y(OTzlChmPEG) | C[N+](C)(CCc1cn(C COc2ccc(C[C@@H] (C([R])═O)N[R])cc2) nn1)CCOC |
| | C20H30N5O3R2+ | | |
| 211 | [chemical structure] | Y(OTzlChmPEG3) | C[N+](C)(CCc1cn(C COc2ccc(C[C@@H] (C([R])═O)N[R])cc2) nn1)CCOCCOCCOC |
| | C24H38N5O5R2+ | | |
| 212 | [chemical structure] | YC8CO(NHPEG3a) | C[N+](C)(C)CCOCC OCCNC(CCCCCCC COc1ccc(C[C@@H] (C([R])═O)N[R]) cc1)═O |
| | C27H46N3O5R2+ | | |
| 213 | [chemical structure] | aMeK(PEG12gEC16) | CCCCCCCCCCCCC CCC(N[C@@H](CC C(NCCOCCOCCOC COCCOCCOCCOC |
| | | | COCCOCCOCCOC |
| | | | COCCC(NCCCC[C |
| | | | @@](C)(C([R])═O) |
| | | | N[R])═O)═O)C |
| | | | (O)═O)═O |
| 214 | [chemical structure] | aMeK(PEG12gEC18 OH) | C[C@@H](C═O)NC ([C@](C)(CCCCNC (CCOCCOCCOCCO CCOCCOCCOCCO |
| | | | CCOCCOCCOCCO |
| | | | CCNC(CC[C@@H] |
| | | | (C(O)═O)NC(CCCC |
| | | | CCCCCCCCCCCCC |
| | | | (O)═O)═O)═O)═ |
| | | | O)NC(CN)═O)═O |
| 215 | [chemical structure] | aMeK(PEG2PEG2gEC 16OH | C[C@](CCCCNC(C OCCOCCNC(COCC OCCNC(CC[C@@H] (C(O)═O)NC(CCCCC |
| | | | CCCCCCCCCC(O)═ |
| | | | O)═O)═O)═O)═O) |
| | | | (C([R])═O)N[R] |
| 216 | [chemical structure] | aMeK(PEG2PEG2gEC1 8OH | C[C@](CCCCNC(CO CCOCCNC(COCCO CCNC(CC[C@@H] (C(O)═O)NC(CCCC |
| | | | CCCCCCCCCCCCC |
| | | | (O)═O)═O)═O)═ |
| | | | O)═O)(C([R])═O) |
| | | | N[R] |
| 217 | [chemical structure] | cPEG3aCO, cPEG3a | C[N+](C)(C)CCOCC OCCC([R])═O |
| | C10H21NO3R+ | | |
| 218 | [chemical structure] | cPEG5aCO, cPEG5a | C[N+](C)(C)CCOCC OCCOCCOCCC ([R])═O |
| | C14H29NO5R+ | | |
| 219 | [chemical structure] | dFPPEG3F | C[N+](CCOCCOCC Oc1ccc(C[C@@H](C ([R])═O)N[R])cc1)(C C1)CCC1(F)F |
| | C21H31F2N2O4R2+ | | |
| 220 | [chemical structure] | dK(cPEG3a), k(cPEG3a), dK(cPEG3aCO), k(cPEG3aCO) | C[N+](C)(C)CCOCC OCCC(NCCCC[C@ H](C([R])═O)N [R])═O |
| | C16H32N3O4R2+ | | |
| 221 | [chemical structure] | gEPEG6 | OC([C@H](CCC(NC COCCOCCOCCOCC OCCOCCC([R])═O)═ O)N[R])═O |
| | C20H36N2O10R2 | | |
| 222 | [chemical structure] | k(PEG12gEC18OH), dK(PEG12gEC18OH) | OC(CCCCCCCCCC CCCCCCC(N[C@@ H](CCC(NCCOCCO CCOCCOCCOCCO |
| | | | CCOCCOCCOCCO |
| | | | CCOCCOCCC(NCC |
| | | | CC[C@H](C([R])═ |
| | | | O)N[R])═O)═O)C |
| | | | (O)═O)═O)═O |
| 223 | [chemical structure] | k(PEG12gEC20OH) dK(PEG12gEC20OH) | OC(CCCCCCCCCC CCCCCCCCC(N[C@ @H](CCC(NCCOCC OCCOCCOCCOCCO |
| | | | CCOCCOCCOCCOC |
| | | | COCCOCCC(NCCC |
| | | | C[C@H](C([R])═O) |
| | | | N[R])═O)═O)C(O)═ |
| | | | O)═O)═O |
| 224 | [chemical structure] | dK(PEG2PEG2Biotin), k(PEG2PEG2Biotin) | O═C(CCCC[C@@H] ([C@H]1N2)SC[C@ @H]1NC2═O)NCCO CCOCC(NCCOCCO CC(NCCCC[C@H](C ([R])═O)N[R])═O)═ O |
| | C28H48N6O9SR2 | | |
| 225 | [chemical structure] | k(PEG2PEG2C18GolB), dK(PEG2PEG2C18Go lB) | CN(CCOCCOCC(NC COCCOCC(NCCCC [C@H](C([R])═O)N [R])═O)═O)C(CCCC |
| | | | CCCCCCCCCCCCC |
| | | | (NC(CO)CO)═O)═O |
| 226 | [chemical structure] | k(PEG2PEG2C18OH), dK(PEG2PEG2C18OH) | OC(CCCCCCCCCC CCCCCCC(NCCOC COCC(NCCOCCOC C(NCCCC[C@H](C |
| | | | ([R])═O)N[R])═O)═ |
| | | | O)═O)═O |
| 227 | [chemical structure] | k(PEG2PEG2GolAC18 OH), dK(PEG2PEG2G olAC18OH) | OCC(CO)(C(NCCOC COCC(NCCOCCOC C(NCCCC[C@H](C ([R])═O)N[R])═ |
| | | | O)═O)═O)NC(CCC |
| | | | CCCCCCCCCCCCC |
| | | | C(O)═O)═O |
| 228 | [chemical structure] | k(PEG2PEG2PPPgEC18 OH) dK(PEG2PEG2PPP gEC18OH) | OC(CCCCCCCCCC CCCCCCC(N[C@@ H](CCC(N(CCC1)[C @@H]1C(N(CCC1) |
| | | | [C@@H]1C(N(CCC |
| | | | 1)[C@@H]1C(NCCO |
| | | | CCOCC(NCCOCCO |
| | | | CC(NCCCC[C@H] |
| | | | (C([R])═O)N[R])═ |
| | | | O)═O)═O)═O)═O)═ |
| | | | O)C(O)═O)═O)═O |
| 229 | [chemical structure] | k(PEG2PEG2PgEC18 OH), dK(PEG2PEG2 PgEC18OH) | OC(CCCCCCCCCC CCCCCCC(N[C@@ H](CCC(N(CCC1)[C @@H]1C(NCCOCC |
| | | | OCC(NCCOCCOC |
| | | | C(NCCCC[C@H](C |
| | | | ([R])═O)N[R])═O)═ |
| | | | O)═O)═O)C(O)═ |
| | | | O)═O)═O |
| 230 | [chemical structure] | k(PEG2PEG2Sp6gEC 18OH), dK(PEG2PEG2 Sp6gEC18OH) | C[N+](C)(CCNC(CC [C@@H](C(O)═O)N C(CCCCCCCCCCC CCCCCC(O)═O)═ |
| | | | O)═O)CC(NCCOCC |
| | | | OCC(NCCOCCOCC |
| | | | (NCCCC[C@H](C |
| | | | ([R])═O)N[R])═O)═ |
| | | | O)═O |
| 231 | [chemical structure] | k(PEG2PEG2TrxgEC18 OH), dK(PEG2PEG2 TrxgEC18OH) | OC(CCCCCCCCCC CCCCCCC(N[C@@ H](CCC(NC[C@H] (CC1)CC[C@@H] |
| | | | 1C(NCCOCCOCC(N |
| | | | CCOCCOCC(NCCC |
| | | | C[C@H](C([R])═O) |
| | | | N[R])═O)═O)═O)═ |
| | | | O)C(O)═O)═O)═O |
| 232 | [chemical structure] | k(PEG2PEG2gE(C)C12, dK(PEG2PEG2gE(C) C12 | CCCCCCCCCCCC(N [C@@H](CCC(NCC OCCOCC(NCCOCC OCC(NCCCC[C@H] |
| | | | (C([R])═O)N[R])═ |
| | | | O)═O)═O)C(N[C@ |
| | | | @H](CC(O)═O)C |
| | | | [N+](C)(C)C)═O)═O |
| 233 | [chemical structure] | k(PEG2PEG2gE(C)C18 OH, dK(PEG2PEG2g E(C)C180H | C[N+](C)(C)C[C@H] (CC(O)═O)NC([C@ H](CCC(NCCOCCO CC(NCCOCCOCC(N |
| | | | CCCC[C@H](C |
| | | | ([R])═O)N[R])═ |
| | | | O)═O)═O)NC(CCC |
| | | | CCCCCCCCCCCC |
| | | | CC(O)═O)═O)═O |
| 234 | [chemical structure] | k(PEG2PEG2gE(c)C12, dK(PEG2PEG2gE(c)C12 | CCCCCCCCCCCC(N [C@@H](CCC(NCC OCCOCC(NCCOCC OCC(NCCCC[C@H] |
| | | | (C([R])═O)N[R])═ |
| | | | O)═O)═O)C(N[C@ |
| | | | H](CC(O)═O)C[N+] |
| | | | (C)(C)C)═O)═O |
| 235 | [chemical structure] | k(PEG2PEG2gE(c)C18 OH, dK(PEG2PEG2gE (c)C18OH | C[N+](C)(C)C[C@@ H](CC(O)═O)NC([C @H](CCC(NCCOCC OCC(NCCOCCOCC |
| | | | (NCCCC[C@H](C |
| | | | ([R])═O)N[R])═O)═ |
| | | | O)═O)NC(CCCCCC |
| | | | CCCCCCCCCCC |
| | | | (O)═O)═O)═O |
| 236 | [chemical structure] | k(PEG2PEG2gEC10OH), dK(PEG2PEG2gEC10 OH) | OC(CCCCCCCCC(N [C@@H](CCC(NCC OCCOCC(NCCOCC OCC(NCCCC[C@H] |
| | | | (C([R])═O)N[R])═ |
| | | | O)═O)═O)C(O)═ |
| | | | O)═O)═O |
| 237 | [chemical structure] | k(PEG2PEG2gEC12O H(C), dK(PEG2PEG2g EC12OH(C) | C[N+](C)(C)C[C@H] (CC(O)═O)NC(CCC CCCCCCCC(N[C@ @H](CCC(NCCOCC |
| | | | OCC(NCCOCCOCC |
| | | | (NCCCC[C@H](C |
| | | | ([R])═O)N[R])═O)═ |
| | | | O)═O)C(O)═O)═ |
| | | | O)═O |
| 238 | [chemical structure] | k(PEG2PEG2gEC12O H(c), dK(PEG2PEG2g EC12OH(c) | C[N+](C)(C)C[C@@ H](CC(O)═O)NC(CC CCCCCCCCC(N[C@ @H](CCC(NCCOCC |
| | | | OCC(NCCOCCOCC |
| | | | (NCCCC[C@H](C |
| | | | ([R])═O)N[R])═O)═ |
| | | | O)═O)C(O)═O)═ |
| | | | O)═O |
| 239 | [chemical structure] | k(PEG2PEG2gEC16), dK(PEG2PEG2gEC16) | CCCCCCCCCCCCC CCC(N[C@@H](CC C(NCCOCCOCC(NC COCCOCC(NCCCC |
| | | | [C@H](C([R])═O)N |
| | | | [R])═O)═O)═O)C |
| | | | (O)═O)═O |
| 240 | [chemical structure] | k(PEG2PEG2gEC16OH), dK(PEG2PEG2gEC16 OH) | OC(CCCCCCCCCC CCCCC(N[C@@H] (CCC(NCCOCCOCC (NCCOCCOCC(NCC |
| | | | CC[C@H](C([R])═ |
| | | | O)N[R])═O)═O)═ |
| | | | O)C(O)═O)═O)═O |
| 241 | [chemical structure] | k(PEG2PEG2gEC18), dK(PEG2PEG2gEC18) | CCCCCCCCCCCCC CCCCC(N[C@@H] (CCC(NCCOCCOCC (NCCOCCOCC(NCC |
| | | | CC[C@H](C([R])═ |
| | | | O)N[R])═O)═O)═O) |
| | | | C(O)═O)═O |
| 242 | [chemical structure] | k(PEG2PEG2gEC18OH (C), dK(PEG2PEG2gEC 18OH(C) | C[N+](C)(C)C[C@H] (CC(O)═O)NC(CCC CCCCCCCCCCCCC C(N[C@@H](CCC(N |
| | | | CCOCCOCC(NCCO |
| | | | CCOCC(NCCCC[C@ |
| | | | H](C([R])═O)N[R])═ |
| | | | O)═O)═O)C(O)═ |
| | | | O)═O)═O |
| 243 | [chemical structure] | k(PEG2PEG2gEC18OH (c), dK(PEG2PEG2gEC 18OH(c) | C[N+](C)(C)C[C@@ H](CC(O)═O)NC(CC CCCCCCCCCCCCC CC(N[C@@H](CCC |
| | | | (NCCOCCOCC(NCC |
| | | | OCCOCC(NCCCC[C |
| | | | @H](C([R])═O)N |
| | | | [R])═O)═O)═O) |
| | | | C(O)═O)═O)═O |
| 244 | [chemical structure] | k(PEG2PEG2gEC18OH), dK(PEG2PEG2gEC18 OH) | OC(CCCCCCCCCC CCCCCCC(N[C@@ H](CCC(NCCOCCO CC(NCCOCCOCC |
| | | | (NCCCC[C@H](C |
| | | | ([R])═O)N[R])═O)═ |
| | | | O)═O)C(O)═O)═ |
| | | | O)═O |
| 245 | [chemical structure] | k(PEG2PEG2gEC20OH), dK(PEG2PEG2gEC20 OH) | OC(CCCCCCCCCC CCCCCCCCC(N[C@ @H](CCC(NCCOCC OCC(NCCOCCOCC |
| | | | (NCCCC[C@H](C |
| | | | ([R])═O)N[R])═O)═ |
| | | | O)═O)C(O)═O)═ |
| | | | O)═O |
| 246 | [chemical structure] | k(PEG2PEG2gEDAP(C 16OH)2), dK(PEG2PEG 2gEDAP(C16OH)2) | OC(CCCCCCCCCC CCCCC(NC[C@@H] (C(N[C@@H](CCC (NCCOCCOCC(NC |
| | | | COCCOCC(NCCCC |
| | | | [C@H](C([R])═O)N |
| | | | [R])═O)═O)═O)C |
| | | | (O)═O)═O)NC(CCC |
| | | | CCCCCCCCCCC |
| | | | C(O)═O)═O)═O)═O |
| 247 | [chemical structure] | kPEG2PEG2gEDAP(C 16OH)2; kPEG2PEG2 gEDap(C16OH)2, k(PE G2PEG2gEDAP(C16O | C[N+](C)(CCNC(CC CCCCCCCCCCCCC CC(O)═O)═O)CC(N [C@@H](CCC(NCC |
| | | H)2), dKPEG2PEG2g | OCCOCC(NCCOCC |
| | | EDAP(C16OH)2; dKP | OCC(NCCCC[C@H] |
| | | EG2PEG2gEDap(C16 | (C([R])═O)N[R])═ |
| | | OH)2, dK(PEG2PEG | O)═O)═O)C(O)═ |
| | | 2gEDAP(C16OH)2) | O)═O |
| 248 | [chemical structure] | kPEG2PEG2gEDAP(C16 OH)2, dKPEG2PEG2g EDAP(C16OH)2 | OC(CCCCCCCCCC CCCCCCC(NC[C@ H](CC1)CC[C@@H] 1C(N[C@@H](CCC |
| | | | (NCCOCCOCC(NC |
| | | | COCCOCC(NCCCC |
| | | | [C@H](C([R])═O)N |
| | | | [R])═O)═O)═O)C |
| | | | (O)═O)═O)═O)═O |
| 249 | [chemical structure] | k(PEG2PEG2gESp6C18 OH), dK(PEG2PEG2gE Sp6C18OH) | OC(CCCCCCCCCC CCCCCCCCC(NC[C @H](CC1)CC[C@@ H]1C(N[C@@H](CC |
| | | | C(NCCOCCOCC(N |
| | | | CCOCCOCC(NCCC |
| | | | C[C@H](C([R])═O) |
| | | | N[R])═O)═O)═O)C |
| | | | (O)═O)═O)═O)═O |
| 250 | [chemical structure] | k(PEG2PEG2gETrxC18 OH), dK(PEG2PEG2gE TrxC18OH) | OC([C@H](CCC(NC COCCOCC(NCCOC COCC(NCCCC[C@ H](C([R])═O)N[R])═ |
| | | | O)═O)═O)NC(CCC |
| | | | CCCCCCOc1cc(C |
| | | | (O)═O)ccc1)═O)═O |
| 251 | [chemical structure] | k(PEG2PEG2gETrxC20 OH), dK(PEG2PEG2gE TrxC200H) | OC([C@H](CCC(NC COCCOCC(NCCOC COCC(NCCCC[C@ H](C([R])═O)N[R])═ |
| | | | O)═O)═O)NC(CCC |
| | | | CCCCCCOc(cc1)cc |
| | | | c1C(O)═O)═O)═O |
| 252 | [chemical structure] | k(PEG2PEG2gEmXOH), dK(PEG2PEG2gEmX OH) | OC(CCCCCCCCCC CCCCCCC(N[C@@ H](CCC(N(CCC1)[C @H]1C(NCCOCCO |
| | | | CC(NCCOCCOCC(N |
| | | | CCCC[C@H](C([R])═ |
| | | | O)N[R])═O)═O)═ |
| | | | O)═O)C(O)═O)═ |
| | | | O)═O |
| 253 | [chemical structure] | k(PEG2PEG2gEpXOH), dK(PEG2PEG2gEpX OH) | OC(CCCCCCCCCC CCCCCCC(N[C@@ H](CCC(N(CCC1)[C @H]1C(N(CCC1)[C |
| | | | @H]1C(N(CCC1)[C |
| | | | @H]1C(NCCOCCO |
| | | | CC(NCCOCCOCC |
| | | | (NCCCC[C@H](C |
| | | | ([R])═O)N[R])═O)═ |
| | | | O)═O)═O)═O)═O) |
| | | | C(O)═O)═O)═O |
| 254 | [chemical structure] | k(PEG2PEG2pgEC18O H), dK(PEG2PEG2pg EC18OH) | OC(CCCCCCCCCC CCCCCCC(N[C@@ H](CCC(NCCOCCO CCOCCOCCOCCO |
| | | | CCC(NCCOCCOCC |
| | | | (NCCCC[C@H](C |
| | | | ([R])═O)N[R])═O)═ |
| | | | O)═O)C(O)═O)═ |
| | | | O)═O |
| 255 | [chemical structure] | k(PEG2PEG2pppgEC18 OH), dK(PEG2PEG2pp pgEC18OH) | O═C(CCCC[C@@H] ([C@H]1N2)SC[C@ @H]1NC2═O)NCCO CCOCCOCCOCCO |
| | | | CCOCCC(NCCCC[C |
| | | | @H](C([R])═O)N |
| | | | [R])═O |
| 256 | [chemical structure] | k(PEG2PEG6gEC18OH), dK(PEG2PEG6gEC18 H) | CC(NCCOCCOCCO CCOCCOCCOCCOC COCCOCCOCCOCC OCCC(NCCCC[C@ |
| | | | H](C([R])═O)N[R])═ |
| | | | O)═O |
| 257 | [chemical structure] | k(dPEG12AcBr), dK(dP EG12AcBr) | CC(NCCOCCOCCO CCOCCOCCOCCC (NCCCC[C@H](C ([R])═O)N[R])═ |
| | | | O)═O |
| 258 | [chemical structure] | k(dPEG12AcVitE), dK(dPEG12AcVitE) | O═C(CCOCCOCCO CCOCCOCCOCCN C(CBr)═O)NCCCC [C@H](C([R])═O)N |
| | | | [R] |
| 259 | [chemical structure] | k(dPEG6Ac), dK(dPE G6Ac) | CC(NCCOCCOCCO CCOCCOCCOCCOC COCCOCCC(NCCC C[C@H](C([R])═O) |
| | | | N[R])═O)═O |
| 260 | [chemical structure] | k(dPEG6AcBr), dK(dPE G6AcBr) | O═C(CCOCCOCCO CCOCCOCCOCCO CCOCCOCCNC (CBr)═O)NCCCC[C |
| | | | @H](C([R])═O)N[R] |
| 261 | [chemical structure] | k(dPEG9Ac), dK(dPEG 9Ac) | CC(C)CCC[C@@H] (C)CCC[C@@H](C) CCC[C@](C)(CC1) Oc(c(C)c2C)c1c(C)c |
| | | | 2OCC(N[C@@H](C |
| | | | CC(NCCOCCOCCO |
| | | | CCOCCOCCOCCC |
| | | | (NCCCC[C@H](C |
| | | | ([R])═O)N[R])═O)═ |
| | | | O)C(O)═O)═O |
| 262 | [chemical structure] | mPEG12CO | COCCOCCOCCOC COCCOCCOCCOC COCCOCCOCCOC CC([R])═O |
| | C26H51O13R | | |
| 263 | [chemical structure] | mPEG2TMA4F | C[N+](C)(CCCCOc1 ccc(C[C@@H](C ([R])═O)N[R])cc1) CCOC |
| | C18H29N2O3R2+ | | |
| 264 | [chemical structure] | mPEG3CO | COCCOCCOCC ([R])═O |
| | C7H13O4R | | |
| 265 | [chemical structure] | mPEG6CO | COCCOCCOCCOC COCCOCCC([R])═O |
| | C14H2707R | | |

[chemical structure]

### General Peptide Synthetic Procedure 1

[0474] IL-23R inhibitor compounds described herein were synthesized from amino acids monomers using Merrifield solid phase synthesis techniques on Protein Technology's Symphony multiple channel synthesizer. The peptides were assembled using HBTU (O-Benzotriazole-N,N,N′,N′-tetramethyl-uronium-hexafluoro-phosphate), Diisopropylethylamine (DIEA) coupling conditions. For some amino acid couplings PyAOP(7-Azabenzotriazol-1-yloxy)tripyrrolidinophosponium hexafluorophosphate) and DIEA conditions were used. Rink Amide MBHA resin (100-200 mesh, 0.57 mmol/g) was used for peptide with C-terminal amides and pre-loaded Wang Resin with N-α-Fmoc protected amino acid was used for peptide with C-terminal acids. The coupling reagents (HBTU and DIEA premixed) were prepared at 100 mmol concentration. Similarly, amino acids solutions were prepared at 100 mmol concentration. Peptide inhibitors of the present invention were identified based on medical chemistry optimization and/or phage display and screened to identify those having superior binding and/or inhibitory properties.

### Preparation of Certain Modified Amino Acids

### Synthesis of 7-(3-Nacetyl-phenyl)-tryptophan (7(3NAcPh)W) (S)-2-((((9H-fluoren-9-yl)methoxy)carbonyl)amino)-3-(7-(3-acetamidophenyl)-1H-indol-3-yl)propanoic acid

[chemical structure]

[0475] To a solution of 1 (30.0 g, 153 mmol), compound 2 (41.1 g, 230 mmol) and K3PO4 (97.4 g, 459 mmol) in H₂O/ethanol (500 mL) and, Pd(dppf)Cl2 (1.12 g, 1.53 mmol) was added under an N₂ atmosphere. The mixture was stirred at 80° C. for 16 h. The mixture was filtered. The mixture was concentrated, then extracted with ethyl acetate (500 mL×2), dried with anhydrous Na₂SO₄. The organic layer was concentrated and purified by FCC (eluent: petroleum ether/ethyl acetate=1:0 to 55:45) to give 3 (25.0 g, yield: 62.5%) as yellow oil MS (ESI): mass calculated for C16H14N2O, 250.295, m/z found 251.0 [M+].

[0476] To a 1 L round-bottomed flask containing a solution of 3 (12.0 g, 47.9 mmol) in DMF (300 mL) bromine (Br₂, 2.422 mL, 47.0 mmol) was slowly added. The mixture was stirred at 25° C. for 16 hours. The solution was added to aqueous sodium sulfite (500 mL), the mixture was stirred at 25° C. for 2 hours. The mixture was filtered, the filter cake was mixed with H₂O (400 mL) and stirred at 25° C. for 1 h. The mixture was filtered, the solid was collected to give 4 as a crude product, which was purified by preparative high-performance liquid chromatography (Column: Phenomenex C18 250×50 mm×10 um, Condition: water (FA)-CAN (20%-60%)). The mixture was concentrated, extracted with CH₂Cl₂ (1 L×2), washed with brine, dried with anhydrous Na₂SO₄. The organic layers was filtered and concentrated to give 4 (9.70 g, yield: 60.8%) as a pale white. MS (ESI): mass calculated For C₁₆H₁₃BrN₂O, 329.191, m/z found 328.8 [M].

[0477] A 250 mL three neck round-bottomed flask was charged with activated Zn powder (5.84 g, 89.3 mmol), DMF (120 mL) and I₂ (382 mg, 1.50 mmol) was added under an N₂ atmosphere at room temperature. After stirring for 20 min, a solution of 5 (13.6 g, 30.1 mmol) in DMF (30 mL) was added to the mixture. The reaction mixture was stirred for 30 min at room temperature, after which 4 (9.70 g, 29.5 mmol), tris(dibenzylideneacetone)-palladium (826 mg, 0.902 mmol), 2-dicyclohexylphosphino-2′,6′-dimethoxybiphenyl (617 mg, 1.50 mmol) were added under an N₂ atmosphere. The reaction mixture was stirred at 50° C. for 12 hours, after which solvent was removed under reduced pressure to give crude product 6. The crude product was extracted with ethyl acetate (1500 mL). The extract was washed with H₂O (500 mL×2), followed by brine (500 mL), after which it was dried over anhydrous Na₂SO₄, filtered, and concentrated to dryness in vacuo to give crude intermediate 6, which was purified by silica gel chromatography (0-100% ethyl acetate/petroleum ether (EtOAc/PE)) to afford 6 (11.0 g, yield: 63.8%) as a brown-yellow oil. MS (ESI): mass calculated for C₃₅H₃₁N₃O₅, 573.638, m/z found 574.1 [M+1].

[0478] Intermediate 6 (11.0 g, 19.2 mmol), a stir bar, Me₃SnOH (3.64 g, 20.1 mmol) and DCE (150 mL) were added to a 250 mL round-bottomed flask and stirred at 50° C. for 12 hours. To the reaction mixture 2 N HCl was added to adjust the to pH to 6. A second reaction starting from intermediate 6 was conducted and the products were combined for further workup. The combined reaction mixture was concentrated under reduced pressure to give the crude, which was purified by preparative HPLC using a Xtimate C18 150×40 mm×5 um (eluent: 38% to 68% (v/v) CH₃CN and H₂O with 0.05% HCl) to afford product 7. The product was suspended in water (100 mL), the mixture frozen using dry ice/ethanol, and then lyophilized to dryness to afford 7 (7(3NAcPh)W. 11.8 g, yield: 66.8%) as a white solid. MS (ESI): mass calculated For C₃₄H₂₉N₃O₅, 559.611, m/z found 560.0 [M+1]. ¹H NMR DMSO-d₆ (400 MHz) δ 10.73 (s, 1H), 10.10 (s, 1H), 7.52-8.02 (m, 7H), 6.96-7.52 (m, 9H), 4.03-4.44 (m, 3H), 3.25 (d, J=13.2 Hz, 2H), 3.01-3.15 (m, 1H), 2.08 (s, 3H).

Synthesis of 5-methyl-pyridyl-alanine (5MePyridinAla)

### (S)-2-((((9H-fluoren-9-yl)methoxy)carbonyl)amino)-3-(5-methylpyridin-3-yl)propanoic acid

[chemical structure]

[0479] Activated Zn powder (8.18 g, 125 mmol), DMF (150 mL) and I₂ (0.534 g, 2.11 mmol) were stirred under an N₂ atmosphere at room temperature for 20 min., after which (R)-methyl 2-((((9H-fluoren-9-yl)methoxy)carbonyl)amino)-3-iodopropanoate (19.0 g, 42.1 mmol) in DMF (25 mL) was added. The reaction mixture was stirred for 30 min at room temperature, after which a mixture of 1 (7.97 g, 46.3 mmol), tris(dibenzylideneacetone)-palladium (1.16 g, 1.26 mmol) and 2-dicyclohexylphosphino-2′,6′-dimethoxybiphenyl (0.864 g, 2.11 mmol) in DMF (25 mL) was added under an N₂ atmosphere. The resulting reaction mixture was stirred at 50° C. for 12 h. The solvent was removed under reduced pressure to give the crude, which was purified by FCC (eluent: petroleum ether:ethyl acetate=1:0 to 0:1 and ethyl acetate:methanol=1:0 to 2:1) to afford the product 2 (10.00 g, 57.0% yield) as a pale yellow liquid. MS (ESI): mass calculated for C₂₅H₂₄N₂O₄, 416.469, m/z found 417.1 [M+H]⁺.

[0480] To a mixture of 2 (9.50 g, 22.8 mmol) in THF (100 mL) was added LiOH·H₂O (1.91 g, 45.6 mmol) in H₂O (10 mL). The mixture was stirred for 1 h at 0° C. TLC showed most SM were consumed. To the reaction mixture was added HCl (1 N) dropwise at ice bath to pH=5. The reaction mixture was concentrated under reduced pressure, then poured into water (200 mL) the mixture was extracted with THF (200 mL×3). The organic layers were combined, washed with brine (100 mL), dried over anhydrous Na₂SO₄. After filtering the organic layers were concentrated under reduced pressure to afford crude product 3, which was purified by FCC (eluent:ethyl acetate:methanol=1:0 to 2:1) to obtain 3 (5MePyridinAla, 6.716 g, yield: 72.3%) as a white powder. MS (ESI): mass calculated For C₂₄H₂₂N₂O₄, 402.442, m/z found 403.1 [M+H]⁺. ¹H NMR DMSO-d₆ (Bruker_400 MHz): δ 8.18 (s, 2H), 7.88 (d, J=7.6 Hz, 2H), 7.63 (d, J=7.2 Hz, 2H), 7.45-7.26 (m, 5H), 6.81 (s, 1H), 4.33-4.21 (m, 1H), 4.20-4.09 (m, 2H), 3.95 (s, 1H), 3.06-3.05 (m, 1H), 2.92-2.89 (m, 1H), 2.18 (s, 3H).

### Synthesis of AEF(G)

### (S)-2-((((9H-fluoren-9-yl)methoxy)carbonyl)amino)-3-(4-(2-(3-((2,2,4,6,7-pentamethyl-2,3-dihydrobenzofuran-5-yl)sulfonyl)guanidino)ethoxy)phenyl)propanoic acid

[chemical structure]

[chemical structure]

[0481] Starting material 1 (9.9 g, 62.2 mmol), a stir bar, Et₃N (14 mL, 101 mmol), and dichloromethane (DCM, 250 mL) were added to a 500 mL round-bottomed flask. The resulting mixture was treated with 2 (10 g, 34.6 mmol) in portions under ice-water bath. Then the reaction mixture was stirred at 25° C. for 12 hours. The reaction mixture was diluted with H₂O (800 mL), extracted with DCM (400 mL×2). The organic phase extracts were combined, washed with brine (800 mL), and concentrated to give the crude intermediate 3 as a yellow solid. The crude intermediate was triturated with ethyl acetate (50 mL) and the suspension isolated via filtration. The filter cake was washed with ethyl acetate (20 mL×3) before drying under reduced pressure to give the 3 (7.12 g, 49%) as a white solid. MS (ESI): mass calculated for C₁₉H₂₉N₃O₅S₆, 411.5, m/z found 412.1 [M+H]⁺.

[0482] Starting material 4 (50.0 g, 148 mmol), a stir bar, DMF (300 mL), and K₂CO₃ (102 g, 739 mmol) were added to a nitrogen-purged 1000 mL round-bottomed flask. The flask was subsequently evacuated and refilled with nitrogen (×3), after which 1,2-dibromoethane (154 mL, 1.78 mol) was added, and the resulting mixture was stirred at 80° C. for 16 h under a N₂ atmosphere. The reaction mixture was filtered and concentrated to dryness under reduced pressure to give the crude product, which was subjected to silica gel chromatography (eluent:EtOAc:pet ether=0-60%) to give the 5 (64 g, 96%) as a light yellow oil. MS (ESI): mass calculated for C₂₀H₃₀BrNO₅, 444.36, m/z found 466.1 [M+Na]⁺.

[0483] Intermediate 5 (6.1 g, 13.7 mmol), 3 (6.2 g, 15.1 mmol), K₂CO₃ (7.6 g, 55.0 mmol), a stir bar, and CH₃CN(100 mL) were charged into a 250 mL round-bottomed flask. The reaction mixture was stirred at 80° C. for 16 h under a N₂ atmosphere. The reaction mixture was cooled to room temperature, diluted with H₂O (200 mL), extracted with ethyl acetate (100 mL×2). The organic phases were combined and washed with brine (300 mL) and concentrated to give the crude intermediate 6. The crude intermediate was purified by flash column chromatography (FCC, eluent:ethyl acetate/petroleum ether=0:1 to 2:1) to give the 6 (6.62 g, 44.2%) as a white solid. MS (ESI): mass calculated for C₃₉H₅₈N₄O₁₀S, 774.9, m/z found 775.5 [M+H]⁺.

[0484] Intermediate 6 (6.6 g, 8.52 mmol), HCl/1, 4-dioxane (90 mL, 4M), a stir bar, and 1, 4-dixoane (30 mL) were charged into a 250 mL round bottomed flask. The resulting mixture was stirred at 25° C. for 12 hr. The solvent was removed under reduced pressure to give intermediate 7 (7.8 g, crude product) as a colourless oil, which was directly used to next step. MS (ESI): mass calculated for C₂₅H₃₄N₄O₆S, 518.6, m/z found 519.2 [M+H]⁺.

[0485] Intermediate 7 (7.80 g, 15.0 mmol), a stir bar, Na₂CO₃ (3.19 g, 30.1 mmol), Fmoc-OSu (5.58 g, 16.5 mmol), 1,4-dioxane (50 mL), and H₂O (50 mL) were added into a 250 mL round-bottomed flask at 25° C. The reaction mixture was stirred at 25° C. for 16 hours, after which it was adjusted to pH=5-6 with HCl (2M) and the resulting reaction mixture was extracted with EtOAc (150 mL×3). The organic phases from the extraction were combined and washed with brine (200 mL) and concentrated to give the crude intermediate 7. The crude intermediate was purified by preparative HPLC with a Column: Phenomenex C18 150×40 mm×5 um, (eluent: 42% to 72% (v/v) CH₃CN and H₂O with 0.1% HCl) to afford pure product. The product was suspended in water (100 mL), the mixture frozen using dry ice/ethanol, and then lyophilized to dryness to afford desired product 8 (AEF(G), 4 g, 36%) as a white solid. MS (ESI): mass calculated for C₄₀H₄₄N₄O₈S, 740.9, m/z found 741.3 [M+H]⁺. ¹H NMR (400 MHZ, DMSO-d₆): 7.87 (d, J=7.2 Hz, 2H), 7.71-7.62 (m, 2H), 7.39 (td, J=4.0, 7.2 Hz, 2H), 7.29 (td, J=7.6, 12.0 Hz, 2H), 7.14 (br d, J=8.0 Hz, 2H), 6.99-6.85 (m, 1H), 6.77 (br d, J=8.4 Hz, 2H), 6.59-6.50 (m, 1H), 4.21-4.06 (m, 4H), 3.88 (br s, 2H), 3.42-3.36 (m, 4H), 2.99 (br dd, J=4.4, 14.0 Hz, 1H), 2.92 (s, 2H), 2.78 (br dd, J=10.8, 13.6 Hz, 1H), 2.47 (br s, 3H), 2.41 (s, 3H), 1.97 (s, 3H), 1.38 (s, 6H).

### Assembly

[0486] The peptides may be assembled using standard Symphony protocols. The peptide sequences were assembled as follows: Resin (250 mg. 0.14 mmol) in each reaction vial was washed twice with 4 ml of DMF followed by treatment with 2.5 ml of 20% 4-methyl piperidine (Fmoc de-protection) for 10 min. The resin was then filtered and washed two times with DMF (4 ml) and re-treated with N-methyl piperidine for additional 30 minute. The resin was again washed three times with DMF (4 ml) followed by addition 2.5 ml of amino acid and 2.5 ml of HBTU-DIEA mixture. After 45 min of frequent agitations, the resin was filtered and washed three timed with DMF (4 ml each). For a typical peptide of the present invention, double couplings were performed. After completing the coupling reaction, the resin was washed three times with DMF (4 ml each) before proceeding to the next amino acid coupling.

### Ring Closing Metathesis to Form Olefins

[0487] An an example of ring closing metathesis a the resin (100 μmol) was washed with 2 ml of DCM (3×1 min) and then with 2 ml of DCE (3×1 min) before being treated with a solution of 2 ml of a 6 mM solution of Grubbs' first-generation catalyst in DCE (4.94 mg ml-1; 20 mol % with regard to the resin substitution). The solution was refluxed overnight (12 h) under nitrogen before being drained. The resin was washed three times with DMF (4 ml each); DCM (4 ml) before being dried and cleaved.

### Cleavage

[0488] Following completion of the peptide assembly, the peptide was cleaved from the resin by treatment with cleavage reagent, such as reagent K (82.5% trigluoroacetic acid, 5% water, 5% thioanisole, 5% phenol, 2.5% 1,2-ethanedithiol). The cleavage reagent was able to successfully cleave the peptide from the resin, as well as all remaining side chain protecting groups.

[0489] The cleaved peptides were precipitated in cold diethyl ether followed by two washings with ethyl ether. The filtrate was poured off and a second aliquot of cold ether was added, and the procedure repeated. The crude peptide was dissolved in a solution of acetonitrile: water (7:3 with 1% TFA) and filtered. The quality of linear peptide was then verified using electrospray ionization mass spectrometry (ESI-MS) (Micromass/Waters ZQ) before being purified.

### Disulfide Bond Formation Via Oxidation

[0490] The peptide containing the free thiol (for example diPen) was assembled on a Rink Amide-MBHA resin following general Fmoc-SPPS procedure. The peptide was cleaved from the resin by treatment with cleavage reagent 90% trifluoroacetic acid, 5% water, 2.5% 1,2-ethanedithiol, 2.5% tri-isopropylsilane). The cleaved peptides were precipitated in cold diethyl ether followed by two washings with ethyl ether. The filtrate was poured off and a second aliquot of cold ether was added, and the procedure repeated. The crude peptide was dissolved in a solution of acetonitrile: water (7:3 with 1% TFA) and filtered giving the wanted unoxidized peptide crude peptide.

[0491] The crude, cleaved peptide with positions X4 and X9, for example, possessing either Cys, Pen, hCys, (D)Pen, (D)Cys or (D)hCys, was dissolved in 20 ml of water: acetonitrile. Saturated Iodine in acetic acid was then added drop wise with stirring until yellow color persisted. The solution was stirred for 15 minutes, and the reaction was monitored with analytic HPLC and LCMS. When the reaction was completed, solid ascorbic acid was added until the solution became clear. The solvent mixture was then purified by first being diluted with water and then loaded onto a reverse phase HPLC machine (Luna C18 support, 10 u, 100 A, Mobile phase A: water containing 0.1% TFA, mobile phase B: Acetonitrile (ACN) containing 0.1% TFA, gradient began with 5% B, and changed to 50% B over 60 minutes at a flow rate of 15 ml/min). Fractions containing pure product were then freeze-dried on a lyophilyzer.

### Thioether Bond Formation

[0492] The peptide containing the free thiol (e.g., Cys) and hSer(OTBDMS) was assembled on a Rink Amide-MBHA resin following general Fmoc-SPPS procedure. Chlorination was carried out by treating the resin with PPh₃ (10 equiv.) and Cl₃CCN (10 equiv.) in DCM for 2 h. The peptide was cleaved from the resin by treatment with cleavage reagent 90% trifluoroacetic acid, 5% water, 2.5% 1,2-ethanedithiol, 2.5% tri-isopropylsilane). The cleaved peptides were precipitated in cold diethyl ether followed by two washings with ethyl ether. The filtrate was poured off and a second aliquot of cold ether was added, and the procedure repeated. The crude peptide was dissolved in a solution of acetonitrile: water (7:3 with 1% TFA) and filtered giving the wanted uncyclized crude peptide

[0493] The crude peptide possessing a free thiol (e.g., Cys, Pen, aMeCys, hCys, (D)Pen, (D)Cys or (D)hCys and the alkyl halide (hSer(Cl)) at either the X4 and X9 position or X9 and X4 position was dissolved in 0.1 M TRIS buffer pH 8.5. Cyclization was allowed to take place overnight at RT. The solvent mixture was then purified by first being diluted two-fold with water and then loaded onto a reverse phase HPLC machine (Luna C18 support, 10 u, 100 A, Mobile phase A: water containing 0.1% TFA, mobile phase B: Acetonitrile (ACN) containing 0.1% TFA, gradient began with 5% B, and changed to 50% B over 60 minutes at a flow rate of 15 ml/min). Fractions containing pure product were then freeze-dried on a lyophilizer

### Purification

[0494] Analytical reverse-phase, high performance liquid chromatography (HPLC) was performed on a Gemini C18 column (4.6 mm×250 mm) (Phenomenex). Semi-Preparative reverse phase HPLC was performed on a Gemini 10 μm C18 column (22 mm×250 mm) (Phenomenex) or Jupiter 10 μm, 300 angstrom (A) C18 column (21.2 mm×250 mm) (Phenomenex). Separations were achieved using linear gradients of buffer B in A (Mobile phase A: water containing 0.15% TFA, mobile phase B: Acetonitrile (ACN) containing 0.1% TFA), at a flow rate of 1 mL/min (analytical) and 15 mL/min (preparative). Separations were achieved using linear gradients of buffer B in A (Mobile phase A: water containing 0.15% TFA, mobile phase B: Acetonitrile (ACN) containing 0.1% TFA), at a flow rate of 1 mL/min (analytical) and 15 mL/min (preparative).

### General Procedure 1A:

[0495] IL-23R inhibitor compounds described herein were synthesized from amino acids monomers using standard Fmoc solid phase synthesis techniques on a CEM Liberty Blue™ microwave peptide synthesizer. The peptides were assembled using Oxyma/DIC (ethyl cyanohydroxyiminoacetate/diisopropyl-carbodiimide) with microwave heating. Rink Amide-MBHA resin (100-200 mesh, 0.66 mmol/g) was used for peptides with C-terminal amides and pre-loaded Wang Resin with N-α-Fmoc protected amino acid was used for peptide with C-terminal acids. Oxyma was prepared as a 1M solution in DMF with 0.1M DIEA. DIC was prepared as 0.5M solution in DMF. The Amino acids were prepared at 200 mM. Peptide inhibitors of the present invention were identified based on medicinal chemistry optimization and/or phage display and screened to identify those having superior binding and/or inhibitory properties.

### Assembly

[0496] The peptides may also be made using standard CEM Liberty Blue™ protocols. The peptide sequences were assembled as follows: Resin (400 mg, 0.25 mmol) was suspended in 10 ml of 50/50 DMF/DCM. The resin was then transferred to the reaction vessel in the microwave cavity. The peptide was assembled using repeated Fmoc deprotection and Oxyma/DIC coupling cycles. For deprotection, 20% 4-methylpiperidine in DMF was added to the reaction vessel and heated to 90° C. for 65 seconds. The deprotection solution was drained and the resin washed three times with DMF. For most amino acids, 5 equivalents of amino acid, Oxyma and DIC were then added to the reaction vessel and microwave irradiation rapidly heated the mixing reaction to 90° C. for 4 min. For Arginine and Histidine residues, milder conditions using respective temperatures of 75 and 50° C. for 10 min were used to prevent racemization. Rare and expensive amino acids were often coupled manually overnight at room temperature using only 1.5-2 eq of reagents. Difficult couplings were often double coupled 2×4 min at 90° C. After coupling the resin was washed with DMF and the whole cycle was repeated until the desired peptide assembly was completed.

### Cleavage

[0497] Following completion of the peptide assembly, the peptide was then cleaved from the resin by treatment with a standard cleavage cocktail of 91:5:2:2 TFA/H₂O/TIPS/DODT for 2 hrs. If more than one Arg (pbf) residue was present the cleavage was allowed to go for an additional hour.

[0498] The cleaved peptides were precipitated in cold diethyl ether. The filtrate was decanted off and a second aliquot of cold ether was added, and the procedure was repeated. The quality of linear peptide was then verified using electrospray ionization mass spectrometry (ESI-MS) (Waters® Micromass® ZQ™) before being purified.

### Disulfide Bond Formation Via Oxidation

[0499] The peptide containing the free thiol (for example diPen) was assembled on a Rink Amide-MBHA resin following general Fmoc solid phase synthesis, cleavage and isolation as described above.

[0500] The crude cleaved peptide comprising two thiol containing amino acids selected independently from Cys, Pen, hCys, (D)Pen, (D)Cys and (D)hCys was dissolved ˜2 mg/ml in 50/50 acetonitrile/water. Saturated iodine in acetic acid was then added dropwise with stirring until yellow color persisted. The solution was stirred for a few minutes, and the reaction was monitored with analytic HPLC and LCMS. When the reaction was completed, solid ascorbic acid was added until the solution became clear. The solvent mixture was then purified by first being diluted with water and then loaded onto a reverse phase HPLC Column (Luna® C18 support, 10 u, 100 A, Mobile phase A: water containing 0.1% TFA, mobile phase B: acetonitrile (ACN) containing 0.1% TFA, gradient began with 15% B, and changed to 50% B over 60 minutes at a flow rate of 15 ml/min). Fractions containing pure product were then freeze-dried on a lyophilizer.

### Purification

[0501] Analytical reverse-phase, high performance liquid chromatography (HPLC) was performed on a Gemini® C18 column (4.6 mm×250 mm) (Phenomenex). Semi-Preparative reverse phase HPLC was performed on a Gemini® 10 μm C18 column (22 mm×250 mm) (Phenomenex) or Jupiter® 10 μm, 300 angstrom (A) C18 column (21.2 mm×250 mm) (Phenomenex). Separations were achieved using linear gradients of buffer B in A (Mobile phase A: water containing 0.15% TFA, mobile phase B: Acetonitrile (ACN) containing 0.1% TFA), at a flow rate of 1 mL/min (analytical) and 20 mL/min (preparative).

### Example 1. Preparation of Peptide of SEQ ID NO.: 1

[0502] Ac-[Pen]*-N-T-[W (7-Me)]-[Lys(Ac)]-[Pen]*-Phe [4-(2-aminoethoxy)]-[2-Nal]-[THP]-E-N-[3-Pal]-Sarc-NH₂ (*Pen-Pen form disulfide bond) (SEQ ID NO.: 1)

[chemical structure]

[0503] The synthesis of SEQ ID NO.: 1 is prepared using FMOC solid phase peptide synthesis techniques.

[0504] The peptide is constructed on Rink Amide MBHA resin using standard FMOC protection synthesis conditions reported in the literature. The constructed peptide is isolated from the resin and protecting groups by cleavage with strong acid followed by precipitation. Oxidation to form the disulfide bond is performed followed by purification by reverse phase HPLC (RP-HPLC) and counter ion exchange. Lyophilization of pure fractions gives the final product.

[0505] Swell Resin: 10 g of Rink Amide MBHA solid phase resin (0.66 mmol/g loading) is transferred to a 250 ml peptide vessel with filter frit, ground glass joint and vacuum side arm. The resin is washed 3× with DMF.
[0506] Step 1: Coupling of FMOC-Sarc-OH: Deprotection of the resin bound FMOC group is realized by adding 2 resin-bed volumes of 20% 4-methyl-piperidine in DMF to the swollen resin and shaking for 3-5 min prior to draining and adding a second, 2-resin-bed volume of the 4-methyl piperidine solution and shaking for an additional 20-30 min. After deprotection the resin is washed 3x DMF with shaking. FMOC-Sarc-OH (3 eq. 6.2 g) is dissolved in 100 ml DMF along with Oxyma (4.5 eq. 4.22 g). Preactivation of the acid is accomplished by addition of DIC (3.9 eq. 4 ml) with shaking for 15 min prior to addition to the deprotected resin. An additional aliquot of DIC (2.6 eq. 2.65 ml) is then added after ˜15 min of coupling. The progress of the coupling reaction is monitored by the colorimetric Kaiser test. Once the reaction is judged complete the resin is washed 3×DMF with shaking prior to starting the next deprotection/coupling cycle.
[0507] Step 2: Coupling of FMOC-3Pal-OH: FMOC deprotection is again accomplished by adding two sequential, 2-resin-bed volumes of 20% 4-methyl-piperidine in DMF, one times 3-5 minutes and one times 20-30 minutes, draining in between treatments. The resin is then washed 3 times prior to coupling with protected 3-pyridyl alanine (3Pal). FMOC-3Pal-OH (3 eq, 7.8 g) is dissolved in DMF along with Oxyma (4.5 eq. 4.22 g). Preactivation with DIC (3.9 eq, 4 ml) for 15 minutes is done prior to addition to the Sarc-Amide resin. After 15 minutes, an additional aliquot of DIC (2.6 eq. 2.65 ml) is added to the reaction. Once the reaction is complete as determined by the Kaiser test, the resin is again washed 3× with DMF prior to starting the next deprotection/coupling cycle.
[0508] Step 3: Coupling of FMOC-Asn(Trt)-OH: The FMOC is removed from the N-terminus of the resin bound 3Pal and washed as previously described. FMOC-Asn(Trt)-OH (2 eq, 8 g) is dissolved in 100 ml of DMF along with Oxyma (3 eq. 2.81 g). DIC (2.6 eq. 2.65 ml) is added for preactivation of the acid for ˜15 minutes prior to addition to the 3Pal-Sarc-Amide resin. After ˜15 minutes, an additional aliquot of DIC (1.4 eq. 1.43 ml) is added to the reaction. Once the reaction is complete as determined by the Kaiser test, the resin is washed 3× with DMF prior to starting the next deprotection/coupling cycle.
[0509] Step 4: Coupling of FMOC-Glu(OtBu)-OH: The FMOC is removed from the N-terminus of the resin bound Asparagine and the resin washed with DMF as previously described. FMOC-Glu(OtBu)-OH (2 eq. 5.91 g) is dissolved in 100 ml of DMF along with Oxyma (3 eq, 2.81 g). DIC (2.6 eq. 2.65 ml) is added for preactivation of the acid ˜15 minutes prior to addition to the Asn(Trt)-3Pal-Sarc-Amide resin. After ˜15 minutes, an additional aliquot of DIC (1.4 eq. 1.43 ml) is added to the reaction. Once the reaction is complete as determined by the Kaiser test the resin is washed 3× with DMF prior to starting the next deprotection/coupling cycle.
[0510] Step 5: Coupling of FMOC-THP-OH: The FMOC is removed from the N-terminus of the resin bound peptide and the resin is washed as previously described. FMOC-THP-OH (3 eq. 7.36 g) is dissolved in 100 ml of DMF along with Oxyma (4.5 eq. 4.22 g). DIC (3.9 eq. 4 ml) is added for preactivation of the acid ˜15 minutes prior to addition to the Glu(OtBu)-Asn(Trt)-3Pal-Sarc-Amide resin. After ˜15 minutes, an additional aliquot of DIC (2.6 eq, 2.65 ml) is added to the reaction. Once the reaction is complete as determined by the Kaiser test the resin is washed 3× with DMF prior to starting the next deprotection/coupling cycle.
[0511] Step 6: Coupling of FMOC-L-Ala (2-Naphthyl)-OH (Nal): The FMOC is removed from the N-terminus of the resin bound peptide and the resin washed as previously described. FMOC-L-Ala (2-Naphthyl)-OH (3 eq. 8.66 g) is dissolved in 100 ml of DMF along with Oxyma (4.5 eq, 4.22 g). DIC (3.9 eq, 4 ml) is added for preactivation of the acid ˜15 minutes prior to addition to the THP-Glu(OtBu)-Asn(Trt)-3Pal-Sarc-Amide resin. After ˜15 minutes, an additional aliquot of DIC (2.6 eq. 2.65 ml) is added. Once the reaction is complete as determined by the Kaiser test the resin was again washed 3× with DMF prior to starting the next deprotection/coupling cycle.
[0512] Step 7: Coupling of FMOC-4-[2-(Boc-amino-ethoxy)]-L-Phenylalanine (FMOC-AEF): The FMOC is removed from the N-terminus of the resin bound peptide and the resin washed as previously described. FMOC-4-[2-(Boc-amino-ethoxy)]-L-Phenylalanine (3 eq, 10.8 g) is dissolved in 100 ml of DMF along with Oxyma (4.5 eq. 4.22 g). DIC (3.9 eq, 4 ml) is added for preactivation of the acid ˜15 minutes prior to addition to the Nal-THP-Glu(OtBu)-Asn(Trt)-3Pal-Sarc-Amide resin. After ˜15 minutes, an additional aliquot of DIC (2.6 eq. 2.65 ml) is added to the reaction. Once the reaction is complete as determined by the Kaiser test the resin is washed 3× with DMF prior to starting the next deprotection/coupling cycle.
[0513] Step 8: Coupling of FMOC-Pen (Trt)-OH: The FMOC is removed from the N-terminus of the resin bound peptide and the resin washed as previously described. FMOC-Pen (Trt)-OH (3 eq. 12.14 g) is dissolved in 100 ml of DMF along with Oxyma (4.5 eq, 4.22 g). DIC (3.9 eq. 4 ml) is added for preactivation of the acid ˜15 minutes prior to addition to the AEF-Nal-THP-Glu(OtBu)-Asn(Trt)-3Pal-Sarc-Amide resin. After ˜15 minutes, an additional aliquot of DIC (2.6 eq. 2.65 ml) is added to the reaction. Once the reaction is complete as determined by the Kaiser test, the resin is again washed 3× with DMF prior to starting the next deprotection/coupling cycle.
[0514] Step 9: Coupling of FMOC-Lys(Ac)-OH: The FMOC is removed from the N-terminus of the resin bound peptide and the resin washed as previously described. FMOC-Lys(Ac)-OH (2 eq. 5.4 g) is dissolved in 100 ml of DMF along with Oxyma (3 eq. 2.81 g). DIC (2.6 eq. 2.65 ml) is added for preactivation of the acid ˜15 minutes prior to addition to the Pen (Trt)-AEF-Nal-THP-Glu(OtBu)-Asn(Trt)-3Pal-Sarc-Amide resin. After ˜15 minutes, an additional aliquot of DIC (1.4 eq. 1.43 ml) is added to the reaction. Once the reaction was complete as determined by the Kaiser test, the resin is again washed 3× with DMF prior to starting the next deprotection/coupling cycle.
[0515] Step 10: Coupling of FMOC-7-Me-Trp-OH: The FMOC is removed from the N-terminus of the resin bound peptide and the resin washed as previously described. FMOC-7-Me-Trp-OH (2 eq. 5.81 g) is dissolved in 100 ml of DMF along with Oxyma (3 eq. 2.81 g). DIC (2.6 eq. 2.65 ml) is added for preactivation of the acid ˜15 minutes prior to addition to the Lys(Ac)-Pen (Trt)-AEF-Nal-THP-Glu(OtBu)-Asn(Trt)-3Pal-Sarc-Amide resin. After ˜15 minutes, an additional aliquot of DIC (1.4 eq. 1.43 ml) is added to the reaction. Once the reaction is complete as determined by the Kaiser test, the resin is again washed 3× with DMF prior to starting the next deprotection/coupling cycle.
[0516] Step 11: Coupling of FMOC-Thr(tBu)-OH: The FMOC is removed from the N-terminus of the resin bound peptide and the resin washed as previously described. FMOC-Thr(tBu)-OH (4 eq. 10.5 g) is dissolved in 100 ml of DMF along with Oxyma (6 eq. 5.62 g). DIC (5.2 eq. 5.3 ml) is added for preactivation of the acid ˜15 minutes prior to addition to the 7MeTrp-Lys(Ac)-Pen (Trt)-AEF-Nal-THP-Glu(OtBu)-Asn(Trt)-3Pal-Sarc-Amide resin. After ˜15 minutes, an additional aliquot of DIC (2.6 eq. 2.65 ml) is added to the reaction. Once the reaction is complete as determined by the Kaiser test, the resin is again washed 3× with DMF prior to starting the next deprotection/coupling cycle.
[0517] Step 12: Coupling of FMOC-Asn(Trt)-OH: The FMOC is removed from the N-terminus of the resin bound peptide and the resin washed as previously described. FMOC-Asn(Trt)-OH (4 eq. 15.8 g) is dissolved in 100 ml of DMF along with Oxyma (6 eq. 5.62 g). DIC (5.2 eq. 5.3 ml) is added for preactivation of the acid ˜15 minutes prior to addition to the Thr (tBu)-7MeTrp-Lys(Ac)-Pen (Trt)-AEF-Nal-THP-Glu(OtBu)-Asn(Trt)-3Pal-Sarc-Amide resin. After ˜15 minutes, an additional aliquot of DIC (2.6 eq. 2.65 ml) is added to the reaction. Once the reaction is complete as determined by the Kaiser test, the resin is again washed 3x with DMF prior to starting the next deprotection/coupling cycle.
[0518] Step 13: Coupling of FMOC-Pen (Trt)-OH: The FMOC is removed from the N-terminus of the resin bound peptide and the resin washed as previously described. FMOC-Pen (Trt)-OH (2 eq. 8.1 g) is dissolved in 100 ml of DMF along with Oxyma (3 eq. 2.81 g). DIC (2.6 eq. 2.65 ml) is added for preactivation of the acid ˜15 minutes prior to addition to the Asn(Trt)-Thr(tBu)-7MeTrp-Lys(Ac)-Pen (Trt)-AEF-Nal-THP-Glu(OtBu)-Asn(Trt)-3Pal-Sarc-Amide resin. After ˜15 minutes, an additional aliquot of DIC (2.6 eq. 2.65 ml) is added to the reaction. Once the reaction is complete as determined by the Kaiser test, the resin is again washed 3× with DMF prior to the final deprotection and acetic acid capping of the constructed peptide.
[0519] Step 14: Acetyl Capping: The FMOC is removed from the N-terminus of the resin bound peptide and the resin washed as previously described. 150 ml of Capping Reagent A (THF/Acetic anhydride/Pyridine, 80:10:10) is added to the constructed Pen (Trt)-Asn(Trt)-Thr (tBu)-7MeTrp-Lys(Ac)-Pen (Trt)-AEF-Nal-THP-Glu(OtBu)-Asn(Trt)-3Pal-Sarc-Amide resin and shaken for 30 min. The resin is washed 3× with DMF followed by 5× with DCM. The resin is divided into 5-50 ml centrifuge tubes and placed under vacuum for 1.5 hrs prior to cleavage with TFA.
[0520] Step 15: TFA Cleavage and Ether precipitation: 200 ml of the TFA cleavage cocktail (90/5/2.5/2.5 TFA/water/TIPS/DODT) is prepared. 40 ml of the cleavage cocktail is added to each of the 5 tubes containing the protected resin bound peptide and shaken for two hours. The spent resin is filtered away and the filtrate divided evenly into 18-50 ml centrifuge tubes for precipitation. Cold diethyl ether is added to each forming a white precipitate that is then centrifuged. The ether is decanted to waste and 2 more ether washes of the precipitate are performed. The resulting white precipitate cake is dried overnight in the hood to give the crude reduced peptide.
[0521] Step 16: Disulfide Oxidation: The crude peptide is oxidized and purified in four 1 L batches. ˜2.5 g of crude peptide is dissolved in 1 L 20% ACN/water. With stirring, a saturated solution of iodine in acetic acid/methanol is added dropwise to the 1 L peptide solution until the yellow/brown color of the I₂ remains and does not fade away. The light yellow solution is allowed to sit for 5 min prior to quenching the excess I₂ with a pinch of ascorbic acid.
[0522] Step 17: RP-HPLC purification: The RP-HPLC purification is performed s immediately following each I₂ oxidation. A preparative purification column (Phenomenex, Luna, C18(2), 100□, 250×50 mm) is equilibrated at 70 ml/min with 20% MPB in MPA (MPA=0.1% TFA/water, MPB=0.1% TFA in ACN). The 1 L of quenched oxidized peptide is loaded onto the equilibrated column at 70 ml/min. After the solvent front elutes, a gradient of 25-45% MPB at 70 ml/min is run over 60 min. The desired material is isolated in fractions and each are analyzed by analytical RP-HPLC. Pure fractions are combined from all four purifications and lyophilized to give purified TFA salt ready for counterion exchange.
[0523] Step 18: Counterion Exchange to Acetate: The same preparative RP-HPLC column is equilibrated with 5% MPB in MPA at 70 ml/min (MPA=0.3% AcOH in Water, MPB=0.3% AcOH in ACN, MPC=0.5M NH₄OAc in Water.) The purified peptide TFA salt is dissolved in 50/50 ACN/water and diluted to 15% ACN. The solution is loaded onto the equilibrated column at 70 ml/min and the solvent front is eluted. The captured peptide is washed with 5% MPB in MPA for 5 min. The captured peptide is then washed with 5% MPB in MPC for 40 min at 70 ml/min to exchange the counterions to Acetate. The captured peptide is washed with 5% MPB in MPA at 70 ml/min for 10 min to clear all NH₄OAc from the system. Finally, the peptide is eluted with a gradient of 5-70% MPB in MPA over 60 minutes and collected in fractions.
[0524] Step 19: Final Lyophilization and Analysis: The collected fractions are analyzed by analytical RP-HPLC, and all fractions >95% purity are combined. Lyophilization of the combined fractions gives SEQ ID NO.: 1 as a white powder with a purity >95% as determined by RP-HPLC. Peptide identity is confirmed with LC/MS of the purified Peptide of SEQ ID NO.: 1, giving 2 charged states of the peptide, M+2/2 of 950 amu and the molecular ion of 1899 amu.

### Example 2. Synthesis of MeCO-r-Pen-N-T-7MeW-K(Ac)-Pen-AEF-2Nal-THP-E-N-5MePyridinAla-Sar-CONH2 (Compound 345, SEQ ID NO:345)

[chemical structure]

[chemical structure]

### Solid-Phase Peptide Synthesis:

[0525] The peptide was chemically synthesized using optimized 9-fluorenylmethoxy carbonyl (Fmoc) solid phase peptide synthesis protocols. For C-terminal amides, Rink-amide MBHA resin was used. The side chain protecting groups were as follows: D-Arg: Pbf; Thr, Glu: O-tButyl; Asn, Pen: Trityl; AEF: Boc. For coupling, a two to three-fold excess of a solution containing Fmoc amino acid, HATU and DIEA (1:0.95:2) in DMF was added to swelled resin for 1 to 4 hours. Double coupling is employed when coupling 2Nal. Fmoc protecting group removal was achieved by treatment with a DMF, piperidine (4:1) solution for 30 min. The cycles are repeated until the full-length peptide is obtained.

### Peptide Cleavage:

[0526] Peptied was cleaved from the rsin by addition of cleavage buffer (5.0% DTT/2.5% H2O/2.5% TIS/90% TFA) 75 mL to the flask containing the side chain protected peptide at room temperature and stir for 3 hrs. The resin was filtered and washed with 5 mL TFA. The combined filtrate was precipitated with cold methyl tertbutyl ether (MTBE). The mixture was centrifuged (3000 rpm, 3 min) and decanted. The pellet was washed with MTBE and centrifuged. The lyophilized residue gave crude compound 1 (1.8 g).

### Peptide Cyclization and Purification:

[0527] Crude peptide Compound 1 (1.8 g, 0.86 mmol) was dissolved in 20% MeCN/H2O (1000 mL). To the stirred solution of the peptide was added the iodine solution in MeOH (0.1M, 5.0 mL) drop-wise until solution remains yellow. After ˜2 h LCMS showed the reaction was complete. Excess iodine was quenched by the addition of 1M Na2S2O3 in water (15 uL) (turned colorless instantly). Added 10-20 mL of MeCN to decrease turbidity. Purified the solution by Prep-HPLC (A: 0.075% TFA in H2O, B: ACN) to give compound 345 (371 mg, 96.4% purity, 17.0% yield for this step; over all yield: 14.8%) obtained as white solid. Analysis was performed using a C18 column with a flow rate of 1 mL/min. LCMS calculated MW: 2068.38, observed MW: 1034.5 [(M+2H)/2].

### Example 3. Synthesis of MeCO-Pen-N-T-7MeW-K(Ac)-Pen-AEF(G)-2Nal-THP-E-N-3Pya-Sar-CONH2 (Compound 477 SEQ ID NO:477)

[chemical structure]

### Solid-Phase Peptide Synthesis:

[0528] Peptide were chemically synthesized using optimized 9-fluorenylmethoxy carbonyl (Fmoc) solid phase peptide synthesis protocols. For C-terminal amides, Rink-amide MBHA resin was used. The side chain protecting groups were as follows: AEF(G): Pbf; Thr, Glu: O-tButyl; Asn, Pen: Trityl. For coupling, a two to three-fold excess of a solution containing Fmoc amino acid, HATU and DIEA (1:0.95:2) in DMF was added to swelled resin for 1 to 4 hours. Double coupling is employed when coupling 2Nal. Fmoc protecting group removal was achieved by treatment with a DMF, piperidine (4:1) solution for 30 min. The cycles are repeated until the full-length peptide is obtained.

### Peptide Cleavage:

[0529] Peptide was cleaved from the resin by the addition of cleavage buffer (5.0% DTT/2.5% H2O/2.5% TIS/90% TFA) 75 mL to the flask containing the side chain protected peptide at room temperature and stir for 3 hrs. The resin was filtered washed with 5 mL TFA, and the combined filtrate was precipitated with cold methyl tertbutyl ether (MTBE). The mixture was centrifuged (3000 rpm, 3 min) and decanted. The pellet was washed with MTBE and centrifuged. Lyophilized residue gave crude compound 1 (1.6 g).

### Peptide Cyclization and Purification:

[0530] Crude peptide compound 1 (1.6 g, 0.824 mmol) was dissolved in 20% MeCN/H2O (1000 mL). To a stirred solution of the peptide was added the iodine solution in MeOH (0.1M, 2.0 mL) drop-wise until solution remains yellow. After ˜2 h LCMS showed the reaction was complete. Excess iodine was quenched by the addition of 1M Na2S2O3 in water (15 uL) (turned colorless instantly). Added 10-20 mL of MeCN to decrease turbidity. Purified the solution by Prep-HPLC (A: 0.075% TFA in H2O, B: ACN) to give compound 477 (575 mg, 96.4% purity, 31.0% yield for this step; over all yield: 25.5%) obtained as white solid. Analysis was performed using a C18 column with a flow rate of 1 mL/min (Analysis LCMS Method). LCMS calculated MW: 1940.21, observed MW: 970.7 [(M+2H)/2].

### Example 4. Synthesis of MeCO-r-Abu (1)-N-T-W-K(Ac)-aMeC (1)-AEF-2Nal-THP-E-N-3Pya-Sar-CONH2 (Compound 478, SEQ ID NO:478)

[chemical structure]

[chemical structure]

[chemical structure]

### Solid-Phase Peptide Synthesis:

[0531] Peptide were chemically synthesized using optimized 9-fluorenylmethoxy carbonyl (Fmoc) solid phase peptide synthesis protocols. For C-terminal amides, Rink-amide MBHA resin was used. The side chain protecting groups were as follows: D-Arg: Pbf; Thr, Glu: O-tButyl; Asn, aMeCys: Trityl; AEF, Trp: Boc. For coupling, a two to three-fold excess of a solution containing Fmoc amino acid, HATU and DIEA (1:0.95:2) in DMF or Fmoc amino acid, DIC and HOAT(1:1:1) was added to swelled resin for 1 to 32 hours. Double coupling is employed when coupling 2Nal, Lys(Ac) and Fmoc-4-Br-L-HomoAla-OH. Fmoc protecting group removal was achieved by treatment with a DMF, piperidine (4:1) solution for 30 min. Trityl (“Trt”) protecting group on aMeCys removal was achieved by treatment with trifluoroacetic acid, tri-isopropylsilane and DCM (2.5:2.5:95) solution for 3 min*10 times. For thioether cyclization, a solution containing DIEA (5 eq) in DMF was added to swelled resin for 1h*2 times. The cycles are repeated until the full-length peptide is obtained.

### Synthetic Method for Thioether Cyclization:

[0532] Coupling of Fmoc-4-Br-L-HomoAla-OH. After de-protection, the resin was washed with 30 mL of DMF (5×0.1 min) and followed by addition of 2.5 mL of Fmoc-4-Br-L-HomoAla-OH in DMF (400 mM) and 2.5 mL of coupling reagent HOAT in DMF (400 mM) and DIC (0.16 mL, 1.0 mmol). The coupling reaction was mixed for 16 hrs. Then washed with 30 mL of DMF (5×0.1 min) and repeat coupling one more time for 16˜32 hrs. After completing the coupling reaction, the resin was washed with 30 mL of DMF (3×0.1 min) prior to starting the next step.

[0533] Trityl group removal on aMeCys was accomplished by washing with 30 mL of DMF (5×0.1 min) and DCM (5×0.1 min) followed by addition of 3% TFA and 2.5% TIS in DCM (30 mL) for 3 min*10 times (the reaction solution changed from orange to colorless), washed with DCM, 5% DIEA in DMF and DMF for 3 times

[0534] Thioether cyclization on the resin was accomplished by washing the resin with 30 mL of DMF (5×0.1 min) followed by addition of DIEA (5 eq) in DMF (30 mL), the coupling reaction was mixed for 1h. Cleavage test and LCMS showed the reaction was finished. After completing the coupling reaction, the resin was washed with 30 mL of DMF (3×0.1 min) prior to starting the next step.

### Peptide Cleavage:

[0535] Peptide was claved from the resin by addition of cleavage buffer (5.0% DTT/2.5% H₂O/2.5% TIS/90% TFA) 75 mL to the flask containing the side chain protected peptide at room temperature and stir for 3 hrs. The resin was filtered washed with 5 mL TFA. The combined filtrate was precipitated with cold methyl tertbutyl ether (MTBE). The mixture was centrifuged (3000 rpm, 3 min) and decanted. The pellet was washed with MTBE and centrifuged. Lyophilized the residue to give the compound 1 (750 mg, 75.7% yield, crude)

### Peptide Purification:

[0536] Crude peptide was purified by Prep-HPLC (A: 0.075% TFA in H₂O, B: ACN) to give compound 478 (82 mg, 95.2% purity, 6.72% yield) obtained as white solid. Analysis was performed using a C18 column with a flow rate of 1 mL/min. LCMS calculated MW: 1980.21, observed MW: 990.6 [(M+2H)/2].

### Example 5. Biological Assays

### IL23R Reporter Assay

[0537] Compounds were serially diluted in 100% (v/v) DMSO) and plated using an Echo acoustic dispenser (Labcyte) into 1536-well non-treated black assay plates (Corning #9146). 3 μL of HEK293 cells containing IL-23R, IL-12Rβ1 and a firefly luciferase reporter gene driven by a STAT-inducible promoter (Promega) were added to the plates (4000 cells/well), followed by 3 μL of 10 ng/ml IL-23 (equivalent to EC₉₀ concentration). After 5 h at 37° C., 5% CO₂, 95% relative humidity, cells were placed at 20° C. and treated with BioGlo reagent (Promega) according to the Manufacturer's instructions. Luminescence was measured on a Pherastar FSX (BMG LabTech). Data were normalized to IL-23 treatment (0% inhibition) and 30 μM of control inhibitor (100% inhibition), and IC₅₀ values were determined using a 4-parameter Hill equation. Data for exemplary compounds are shown in Table 3b.

TABLE 3
IL-23 Binding Data for the Compound Numbers 158 to 478.

| Number | IC₅₀ (μM) |
|---|---|
| 158 | 0.18 |
| 159 | 3.29 |
| 160 | 1.45 |
| 161 | 1.1 |
| 162 | 0.3 |
| 163 | 1.03 |
| 164 | 0.38 |
| 165 | 0.37 |
| 166 | 0.48 |
| 167 | 1.02 |
| 168 | 0.63 |
| 169 | 0.28 |
| 170 | 2.2 |
| 171 | 0.47 |
| 172 | 3.41 |
| 173 | >16.61 |
| 174 | 0.21 |
| 175 | 0.26 |
| 176 | 0.43 |
| 177 | 0.35 |
| 178 | 0.39 |
| 179 | 0.63 |
| 180 | 0.74 |
| 181 | 0.62 |
| 182 | 1.02 |
| 183 | 1.31 |
| 184 | 0.93 |
| 185 | 1.24 |
| 186 | 1.91 |
| 187 | 1.07 |
| 188 | 1.98 |
| 189 | 0.48 |
| 190 | 0.12 |
| 191 | >16.61 |
| 192 | 0.35 |
| 193 | 0.27 |
| 194 | 0.22 |
| 195 | 0.16 |
| 196 | 0.24 |
| 197 | 0.24 |
| 198 | >16.61 |
| 199 | 1.9 |
| 200 | 0.72 |
| 201 | 1.09 |
| 202 | 0.54 |
| 203 | 0.42 |
| 204 | 0.66 |
| 205 | >16.61 |
| 206 | ~12.82 |
| 207 | >16.61 |
| 208 | >16.61 |
| 209 | 0.32 |
| 210 | 0.49 |
| 211 | 0.047 |
| 212 | 0.49 |
| 213 | 0.085 |
| 214 | 0.13 |
| 215 | 0.19 |
| 216 | 0.35 |
| 217 | 0.17 |
| 218 | 0.12 |
| 219 | 0.066 |
| 220 | 0.6 |
| 221 | 0.54 |
| 222 | 0.065 |
| 223 | 0.099 |
| 224 | 0.082 |
| 225 | 0.066 |
| 226 | 0.19 |
| 227 | 6.13 |
| 228 | 1.31 |
| 229 | 3.54 |
| 230 | 2.58 |
| 231 | 11.7 |
| 232 | 4.48 |
| 233 | 4.87 |
| 234 | 3.65 |
| 235 | 0.034 |
| 236 | 0.17 |
| 237 | 0.019 |
| 238 | 0.013 |
| 239 | 2.37 |
| 240 | 0.23 |
| 241 | 0.24 |
| 242 | 0.19 |
| 243 | 0.11 |
| 244 | 0.16 |
| 245 | 0.18 |
| 246 | 0.11 |
| 247 | 0.26 |
| 248 | 0.13 |
| 249 | 0.31 |
| 250 | 0.22 |
| 251 | 0.15 |
| 252 | 0.18 |
| 253 | 0.055 |
| 254 | 0.037 |
| 255 | 0.05 |
| 256 | 2.06 |
| 257 | 1.25 |
| 258 | 1 |
| 259 | 0.87 |
| 260 | 0.48 |
| 261 | >16.61 |
| 262 | 5.72 |
| 263 | 0.0067 |
| 264 | 0.0095 |
| 265 | 0.34 |
| 266 | 0.22 |
| 267 | 6.28 |
| 268 | 1.8 |
| 269 | 0.26 |
| 270 | 0.38 |
| 271 | 0.17 |
| 272 | 0.03 |
| 273 | 0.032 |
| 274 | 0.034 |
| 275 | 0.0024 |
| 276 | 0.0031 |
| 277 | 0.0025 |
| 278 | 0.0032 |
| 279 | 0.33 |
| 280 | 0.61 |
| 281 | 0.31 |
| 282 | 0.24 |
| 283 | 0.054 |
| 284 | 0.39 |
| 285 | 0.43 |
| 286 | 0.24 |
| 287 | 0.43 |
| 288 | 0.056 |
| 289 | 0.24 |
| 290 | 0.2 |
| 291 | 2.24 |
| 292 | 2.08 |
| 293 | 0.17 |
| 294 | 0.13 |
| 295 | 0.54 |
| 296 | 0.0055 |
| 297 | 0.29 |
| 298 | 0.0069 |
| 299 | 3.34 |
| 300 | 1.12 |
| 301 | 0.0023 |
| 302 | 0.0028 |
| 303 | 0.21 |
| 304 | 0.091 |
| 305 | 0.045 |
| 306 | 0.068 |
| 307 | 0.004 |
| 308 | 0.52 |
| 309 | 0.6 |
| 310 | 0.13 |
| 311 | 0.65 |
| 312 | 0.64 |
| 313 | 0.15 |
| 314 | 0.0035 |
| 315 | 0.0038 |
| 316 | |
| 317 | |
| 318 | |
| 319 | 0.83 |
| 320 | 0.079 |
| 321 | 0.16 |
| 322 | 0.45 |
| 323 | 0.28 |
| 324 | 0.51 |
| 325 | 0.33 |
| 326 | 0.0037 |
| 327 | 0.44 |
| 328 | 0.097 |
| 329 | 0.0024 |
| 330 | 0.0037 |
| 331 | 0.0049 |
| 332 | 0.0053 |
| 333 | 0.0061 |
| 334 | 4.1 |
| 335 | 0.03 |
| 336 | 0.013 |
| 337 | 0.0029 |
| 338 | >16.61 |
| 339 | 0.0038 |
| 340 | 0.0042 |
| 341 | 0.0053 |
| 342 | 0.0087 |
| 343 | 0.004 |
| 344 | 0.0061 |
| 345 | 0.005 |
| 346 | 0.0062 |
| 347 | 0.029 |
| 348 | >16.61 |
| 349 | 0.012 |
| 350 | 0.15 |
| 351 | 1.06 |
| 352 | 0.0084 |
| 353 | 0.0055 |
| 354 | 0.015 |
| 355 | 0.014 |
| 356 | 0.0032 |
| 357 | 0.0085 |
| 358 | 0.14 |
| 359 | >16.61 |
| 360 | 2.19 |
| 361 | 0.0051 |
| 362 | 0.074 |
| 363 | 0.13 |
| 364 | 0.004 |
| 365 | 0.13 |
| 366 | 0.0041 |
| 367 | 0.096 |
| 368 | 0.018 |
| 369 | 0.0044 |
| 370 | 0.0053 |
| 371 | 0.007 |
| 372 | 0.0065 |
| 373 | 0.0079 |
| 374 | 0.073 |
| 375 | 0.0054 |
| 376 | 0.0068 |
| 377 | 0.0052 |
| 378 | 0.0074 |
| 379 | 0.0044 |
| 380 | 0.024 |
| 381 | 0.0058 |
| 382 | 0.0055 |
| 383 | 0.0071 |
| 384 | 0.0036 |
| 385 | 0.0043 |
| 386 | 0.0043 |
| 387 | 0.055 |
| 388 | 0.11 |
| 389 | 0.006 |
| 390 | 0.0059 |
| 391 | 0.014 |
| 392 | 0.036 |
| 393 | 0.0059 |
| 394 | 0.0066 |
| 395 | 0.0094 |
| 396 | 0.0053 |
| 397 | 0.092 |
| 398 | 0.003 |
| 399 | 0.0046 |
| 400 | 0.0078 |
| 401 | 0.0042 |
| 402 | 0.0035 |
| 403 | 0.007 |
| 404 | 0.0057 |
| 405 | 0.0035 |
| 406 | 0.0034 |
| 407 | 0.0035 |
| 408 | 0.0024 |
| 409 | 0.0033 |
| 410 | 0.0018 |
| 411 | 0.0044 |
| 412 | 0.0028 |
| 413 | 0.0068 |
| 414 | 0.01 |
| 415 | 0.015 |
| 416 | 0.013 |
| 417 | 0.0035 |
| 418 | 0.0036 |
| 419 | 0.0032 |
| 420 | 0.034 |
| 421 | 0.0033 |
| 422 | 0.0077 |
| 423 | 0.021 |
| 424 | 0.018 |
| 425 | 0.015 |
| 426 | 0.046 |
| 427 | 0.0032 |
| 428 | 0.0094 |
| 429 | 0.013 |
| 430 | 0.0051 |
| 431 | 0.0034 |
| 432 | 0.0034 |
| 433 | 0.0093 |
| 434 | 0.0036 |
| 435 | 0.0026 |
| 436 | 0.0037 |
| 437 | 0.0075 |
| 438 | 0.0084 |
| 439 | 0.0048 |
| 440 | 0.0032 |
| 441 | 0.0047 |
| 442 | 0.0058 |
| 443 | 3.22 |
| 444 | 0.04 |
| 445 | 0.0036 |
| 446 | 0.0023 |
| 447 | 0.0033 |
| 448 | 0.0077 |
| 449 | 0.014 |
| 450 | 0.0022 |
| 451 | 0.026 |
| 452 | 0.0069 |
| 453 | 0.013 |
| 454 | 0.002 |
| 455 | 0.001 |
| 456 | 0.0018 |
| 457 | 0.00073 |
| 458 | 0.0021 |
| 459 | 0.057 |
| 460 | 0.024 |
| 461 | 0.0076 |
| 462 | 0.0094 |
| 463 | 0.0012 |
| 464 | 0.024 |
| 465 | |
| 466 | 0.0014 |
| 467 | 0.0046 |
| 468 | 0.0014 |
| 469 | 0.002 |
| 470 | 3.43 |
| 471 | >16.61 |
| 472 | 0.0064 |
| 473 | 0.017 |
| 474 | >16.61 |
| 475 | 0.0069 |
| 476 | 0.0086 |
| 477 | 0.091 |
| 478 | 0.0013 |

DB Cells IL23R pSTAT3 Cell Assay

[0538] IL-23 is believed to play a central role in supporting and maintaining Th17 differentiation in vivo. This process is thought to be mediated primarily through the Signal Transducer and Activator of Transcription 3 (STAT3), with phosphorylation of STAT3 (to yield pSTAT3) leading to upregulation of RORC and pro-inflammatory IL-17. This cell assay examines the levels of pSTAT3 in IL-23R-expressing DB cells when stimulated with IL-23 in the presence of test compounds. Serial dilutions of test peptides and IL-23 (Humanzyme #HZ-1261) at a final concentration of 0.5 nM, were added to each well in a 96 well tissue culture plate (Corning #CLS3894). DB cells (ATCC #CRL-2289), cultured in RPMI-1640 medium (Thermo Scientific #11875093) supplemented with 10% FBS, were added at 5×10E5 cells/well and incubated for 30 minutes at 37° C. in a 5% CO₂ humidified incubator. Changes in phospho-STAT3 levels in the cell lysates were detected using the Cisbio HTRF pSTAT3 (Tyr705) Cellular Assay Kit (Cisbio #62AT3PEH), according to manufacturer's Two Plate Assay protocol. IC₅₀ values were determined from these data. IC₅₀ data for exemplary compounds are shown in Table 4.

TABLE 4
IL-23 Data

| Compound | IC₅₀ (nM) |
|---|---|
| 188 | 0.0507 |
| 190 | 0.064 |
| 191 | 0.042 |
| 195 | 0.0709 |

PBMC pSTAT3 Assay

[0539] Cryopreserved peripheral blood mononuclear cells (PBMCs) from healthy donors were thawed and washed twice in ImmunoCult-XF T cell expansion medium (XF-TCEM) supplemented with CTL anti-aggregate wash. The cells were counted, resuspended at 2×105 cells per mL XF-TCEM supplemented with penicillin/streptomycin and 100 ng/ml IL-1 (BioLegend, 579404), and cultured in tissue culture flasks coated with anti-CD3 (eBioscience, 16-0037-85 or BD Pharmingen, 555329) at 37° C. in 5% CO2. On day 4 of culture, PBMCs were collected, washed twice in RPMI-1640 supplemented with 0.1% BSA (RPMI-BSA), and incubated in RPMI-BSA in upright tissue culture flasks for 4 hours at 37° C. in 5% CO2. Following this ‘starvation,’ a total of 6×104 cells in 30 μL RPMI-BSA was transferred into each well of a 384-well plate pre-spotted with peptide or DMSO. The cells were incubated for 30 minutes prior to the addition of IL-23 at a final concentration of 5 ng/ml. The cells were stimulated with cytokine for 30 minutes at 370C in 5% CO2, transferred onto ice for 10 minutes, and lysed. Cell lysates were stored at −80° C. until phosphorylated STAT3 was measured using the phospho-STAT panel kit (Meso Scale Discovery, K15202D). Results are provided below.

| Compound/ | | PBMC pSTAT3 |
|---|---|---|
| Example | SEQ ID NO: | IC50 (nM) |
| 345 | 345 | 0.0076 |
| 477 | 477 | 0.0055 |
| 478 | 478 | 0.015 |

[0540] Although the foregoing invention has been described in some detail by way of illustration and Example for purposes of clarity of understanding, one of skill in the art will appreciate that certain changes and modifications may be practiced upon review of the specification and within the scope of the appended claims. The full scope of the invention should be determined by reference to the claims, along with their full scope of equivalents, and the specification, along with such variations. In addition, each reference provided herein is incorporated by reference in its entirety to the same extent as if each reference was individually incorporated by reference. Where a conflict exists between the instant application and a reference provided herein, the instant application shall dominate.

LENGTHY TABLES
The patent application contains a lengthy table section. A copy of the table is available in electronic form from the USPTO web site (https://seqdata.uspto.gov/?pageRequest=docDetail&DocID=US20240409598A1). An electronic copy of the table will also be available from the USPTO upon request and payment of the fee set forth in 37 CFR 1.19(b)(3).

The application's sequence listing, which the Patent Office published only in electronic form, follows.

SEQUENCE LISTING (478 sequences)

SEQ ID NO: 1 - protein, 14 aa, synthetic construct
  REGION 1..14: note = Modified peptide: MeCO-r-Pen(3)-N-T-7MeW-K(Ac)-Pen(3)-A-2Nal-THP-E-N-3Pya-Sar -CONH2dR
  SITE 1: note = Mod_Res - C-terminal is: ac
  SITE 1: note = misc_feature - Modified Amino Acid: dR
  SITE 2: note = misc_feature - Modified Amino Acid: Pen
  SITE 5: note = misc_feature - Modified Amino Acid: W7Me
  SITE 6: note = misc_feature - Modified Amino Acid: KAc
  SITE 7: note = misc_feature - Modified Amino Acid: Pen
  SITE 9: note = misc_feature - Modified Amino Acid: 2Nal
  SITE 10: note = misc_feature - Modified Amino Acid: THP
  SITE 13: note = misc_feature - Modified Amino Acid: 3Pya
  SITE 14: note = misc_feature - Modified Amino Acid: MeGly
  SITE 14: note = Mod_Res - N-terminal is: am
  REGION 2..7: note = Disulfid - Cyclic bond: Pen to Pen
RXNTWKXAXXENXG

SEQ ID NO: 2 - protein, 14 aa, synthetic construct
  REGION 1..14: note = Modified peptide: MeCO-r-Pen(3)-N-T-7MeW-K(Ac)-Pen(3)-AEF-A-THP-E-N-3Pya-Sar- CONH2dR
  SITE 1: note = Mod_Res - C-terminal is: ac
  SITE 1: note = misc_feature - Modified Amino Acid: dR
  SITE 2: note = misc_feature - Modified Amino Acid: Pen
  SITE 5: note = misc_feature - Modified Amino Acid: W7Me
  SITE 6: note = misc_feature - Modified Amino Acid: KAc
  SITE 7: note = misc_feature - Modified Amino Acid: Pen
  SITE 8: note = misc_feature - Modified Amino Acid: AEF
  SITE 10: note = misc_feature - Modified Amino Acid: THP
  SITE 13: note = misc_feature - Modified Amino Acid: 3Pya
  SITE 14: note = misc_feature - Modified Amino Acid: MeGly
  SITE 14: note = Mod_Res - N-terminal is: am
  REGION 2..7: note = Disulfid - Cyclic bond: Pen to Pen
RXNTWKXXAXENXG

SEQ ID NO: 3 - protein, 13 aa, synthetic construct
  REGION 1..13: note = Modified peptide: MeCO--Pen(3)-N-T-7MeW-K(Ac)-Pen(3)-AEF-2Nal-THP-Dap(Ac)-N-3 Pya-Sar--CONH2
  SITE 1: note = Mod_Res - C-terminal is: ac
  SITE 1: note = misc_feature - Modified Amino Acid: Pen
  SITE 4: note = misc_feature - Modified Amino Acid: W7Me
  SITE 5: note = misc_feature - Modified Amino Acid: KAc
  SITE 6: note = misc_feature - Modified Amino Acid: Pen
  SITE 7: note = misc_feature - Modified Amino Acid: AEF
  SITE 8: note = misc_feature - Modified Amino Acid: 2Nal
  SITE 9: note = misc_feature - Modified Amino Acid: THP
  SITE 10: note = misc_feature - Modified Amino Acid: Dpr(Ac)
  SITE 12: note = misc_feature - Modified Amino Acid: 3Pya
  SITE 13: note = misc_feature - Modified Amino Acid: MeGly
  SITE 13: note = Mod_Res - N-terminal is: am
  REGION 1..6: note = Disulfid - Cyclic bond: Pen to Pen
XNTWKXXXXXNXG

SEQ ID NO: 4 - protein, 13 aa, synthetic construct
  REGION 1..13: note = Modified peptide: MeCO-Pen(3)-N-T-7MeW-AIB-Pen(3)-AEF-2Nal-THP-AIB-N-3Pya-Sar -CONH2
  SITE 1: note = Mod_Res - C-terminal is: ac
  SITE 1: note = misc_feature - Modified Amino Acid: Pen
  SITE 4: note = misc_feature - Modified Amino Acid: W7Me
  SITE 5: note = misc_feature - Modified Amino Acid: AIB
  SITE 6: note = misc_feature - Modified Amino Acid: Pen
  SITE 7: note = misc_feature - Modified Amino Acid: AEF
  SITE 8: note = misc_feature - Modified Amino Acid: 2Nal
  SITE 9: note = misc_feature - Modified Amino Acid: THP
  SITE 10: note = misc_feature - Modified Amino Acid: AIB
  SITE 12: note = misc_feature - Modified Amino Acid: 3Pya
  SITE 13: note = misc_feature - Modified Amino Acid: MeGly
  SITE 13: note = Mod_Res - N-terminal is: am
  REGION 1..6: note = Disulfid - Cyclic bond: Pen to Pen
XNTWXXXXXXNXG

SEQ ID NO: 5 - protein, 13 aa, synthetic construct
  REGION 1..13: note = Modified peptide: Ac-[Pen]-L-T-[W(7-Me)]-[Lys(Ac)]-[Pen]-[Phe(4-(2-aminoethox y))]-[Nal]-[THP]-E-N-[3Pal]-[Sarc]-NH2
  SITE 1: note = Mod_Res - C-terminal is: ac
  SITE 1: note = misc_feature - Modified Amino Acid: Pen
  SITE 4: note = misc_feature - Modified Amino Acid: W7Me
  SITE 5: note = misc_feature - Modified Amino Acid: KAc
  SITE 6: note = misc_feature - Modified Amino Acid: Pen
  SITE 7: note = misc_feature - Modified Amino Acid: AEF
  SITE 8: note = misc_feature - Modified Amino Acid: Nal
  SITE 9: note = misc_feature - Modified Amino Acid: THP
  SITE 12: note = misc_feature - Modified Amino Acid: 3Pya
  SITE 13: note = misc_feature - Modified Amino Acid: MeGly
  SITE 13: note = Mod_Res - N-terminal is: am
  REGION 1..6: note = Disulfid - Cyclic bond: Pen to Pen
XLTWKXXXXENXG

SEQ ID NO: 6 - protein, 13 aa, synthetic construct
  REGION 1..13: note = Modified peptide: Ac-[Pen]-L-T-[W(7-Me)]-[Lys(Ac)]-[Pen]-[Phe(4-Ad)]-[Nal]-[a MeLeu]-E-N-[3Pal]-[Sarc]-NH2
  SITE 1: note = Mod_Res - C-terminal is: ac
  SITE 1: note = misc_feature - Modified Amino Acid: Pen
  SITE 4: note = misc_feature - Modified Amino Acid: W7Me
  SITE 5: note = misc_feature - Modified Amino Acid: KAc
  SITE 6: note = misc_feature - Modified Amino Acid: Pen
  SITE 7: note = misc_feature - Modified Amino Acid: F4Ad
  SITE 8: note = misc_feature - Modified Amino Acid: Nal
  SITE 9: note = misc_feature - Modified Amino Acid: aMeLeu
  SITE 12: note = misc_feature - Modified Amino Acid: 3Pya
  SITE 13: note = misc_feature - Modified Amino Acid: MeGly
  SITE 13: note = Mod_Res - N-terminal is: am
  REGION 1..6: note = Disulfid - Cyclic bond: Pen to Pen
XLTWKXXXLENXG

SEQ ID NO: 7 - protein, 13 aa, synthetic construct
  REGION 1..13: note = Modified peptide: Ac-[Pen]-L-T-[W(7-Me)]-[Lys(Ac)]-[Pen]-[Phe(4-OMe)]-[Nal]-[ aMeLeu]-E-N-[3Pal]-[Sarc]-NH2
  SITE 1: note = Mod_Res - C-terminal is: ac
  SITE 1: note = misc_feature - Modified Amino Acid: Pen
  SITE 4: note = misc_feature - Modified Amino Acid: W7Me
  SITE 5: note = misc_feature - Modified Amino Acid: KAc
  SITE 6: note = misc_feature - Modified Amino Acid: Pen
  SITE 7: note = misc_feature - Modified Amino Acid: F4OMe
  SITE 8: note = misc_feature - Modified Amino Acid: Nal
  SITE 9: note = misc_feature - Modified Amino Acid: aMeLeu
  SITE 12: note = misc_feature - Modified Amino Acid: 3Pya
  SITE 13: note = misc_feature - Modified Amino Acid: MeGly
  SITE 13: note = Mod_Res - N-terminal is: am
  REGION 1..6: note = Disulfid - Cyclic bond: Pen to Pen
XLTWKXXXLENXG

SEQ ID NO: 8 - protein, 13 aa, synthetic construct
  REGION 1..13: note = Modified peptide: Ac-[Pen]-A-T-[W(7-Me)]-[Lys(Ac)]-[Pen]-[Phe(4-OMe)]-[Nal]-[ aMeLys]-A-A-[3Pal]-[Sarc]-NH2
  SITE 1: note = Mod_Res - C-terminal is: ac
  SITE 1: note = misc_feature - Modified Amino Acid: Pen
  SITE 4: note = misc_feature - Modified Amino Acid: W7Me
  SITE 5: note = misc_feature - Modified Amino Acid: KAc
  SITE 6: note = misc_feature - Modified Amino Acid: Pen
  SITE 7: note = misc_feature - Modified Amino Acid: F4OMe
  SITE 8: note = misc_feature - Modified Amino Acid: Nal
  SITE 9: note = misc_feature - Modified Amino Acid: aMeK
  SITE 12: note = misc_feature - Modified Amino Acid: 3Pya
  SITE 13: note = misc_feature - Modified Amino Acid: MeGly
  SITE 13: note = Mod_Res - N-terminal is: am
  REGION 1..6: note = Disulfid - Cyclic bond: Pen to Pen
XATWKXXXKAAXG

SEQ ID NO: 9 - protein, 13 aa, synthetic construct
  REGION 1..13: note = Modified peptide: Ac-[Pen]-N-T-[W(7-Me)]-[Lys(Ac)]-[Pen]-[Phe(4-OMe)]-[Nal]-[ aMeLys]-A-A-[3Pal]-[Sarc]-NH2
  SITE 1: note = Mod_Res - C-terminal is: ac
  SITE 1: note = misc_feature - Modified Amino Acid: Pen
  SITE 4: note = misc_feature - Modified Amino Acid: W7Me
  SITE 5: note = misc_feature - Modified Amino Acid: KAc
  SITE 6: note = misc_feature - Modified Amino Acid: Pen
  SITE 7: note = misc_feature - Modified Amino Acid: F4OMe
  SITE 8: note = misc_feature - Modified Amino Acid: Nal
  SITE 9: note = misc_feature - Modified Amino Acid: aMeK
  SITE 12: note = misc_feature - Modified Amino Acid: 3Pya
  SITE 13: note = misc_feature - Modified Amino Acid: MeGly
  SITE 13: note = Mod_Res - N-terminal is: am
  REGION 1..6: note = Disulfid - Cyclic bond: Pen to Pen
XNTWKXXXKAAXG

SEQ ID NO: 10 - protein, 13 aa, synthetic construct
  REGION 1..13: note = Modified peptide: Ac-[Pen]-A-T-[W(7-Me)]-[Lys(Ac)]-[Pen]-[Phe(4-OMe)]-[Nal]-[ aMeLys]-[Lys(Ac)]-A-[3Pal]-[Sarc]-NH2
  SITE 1: note = Mod_Res - C-terminal is: ac
  SITE 1: note = misc_feature - Modified Amino Acid: Pen
  SITE 4: note = misc_feature - Modified Amino Acid: W7Me
  SITE 5: note = misc_feature - Modified Amino Acid: KAc
  SITE 6: note = misc_feature - Modified Amino Acid: Pen
  SITE 7: note = misc_feature - Modified Amino Acid: F4OMe
  SITE 8: note = misc_feature - Modified Amino Acid: Nal
  SITE 9: note = misc_feature - Modified Amino Acid: aMeK
  SITE 10: note = misc_feature - Modified Amino Acid: KAc
  SITE 12: note = misc_feature - Modified Amino Acid: 3Pya
  SITE 13: note = misc_feature - Modified Amino Acid: MeGly
  SITE 13: note = Mod_Res - N-terminal is: am
  REGION 1..6: note = Disulfid - Cyclic bond: Pen to Pen
XATWKXXXKKAXG

SEQ ID NO: 11 - protein, 13 aa, synthetic construct
  REGION 1..13: note = Modified peptide: Ac-[Pen]-N-T-[W(7-Me)]-[Lys(Ac)]-[Pen]-[Phe(4-OMe)]-[Nal]-[ aMeLys]-[Lys(Ac)]-A-[3Pal]-[Sarc]-NH2
  SITE 1: note = Mod_Res - C-terminal is: ac
  SITE 1: note = misc_feature - Modified Amino Acid: Pen
  SITE 4: note = misc_feature - Modified Amino Acid: W7Me
  SITE 5: note = misc_feature - Modified Amino Acid: KAc
  SITE 6: note = misc_feature - Modified Amino Acid: Pen
  SITE 7: note = misc_feature - Modified Amino Acid: F4OMe
  SITE 8: note = misc_feature - Modified Amino Acid: Nal
  SITE 9: note = misc_feature - Modified Amino Acid: aMeK
  SITE 10: note = misc_feature - Modified Amino Acid: KAc
  SITE 12: note = misc_feature - Modified Amino Acid: 3Pya
  SITE 13: note = misc_feature - Modified Amino Acid: MeGly
  SITE 13: note = Mod_Res - N-terminal is: am
  REGION 1..6: note = Disulfid - Cyclic bond: Pen to Pen
XNTWKXXXKKAXG

SEQ ID NO: 12 - protein, 12 aa, synthetic construct
  REGION 1..12: note = Modified peptide: Ac-[Pen]-N-T-[W(7-Me)]-[Lys(Ac)]-[Pen]-[Phe(4-(2-aminoethox y))]-[Nal]-[Acvc]-E-N-[THP]-NH2
  SITE 1: note = Mod_Res - C-terminal is: ac
  SITE 1: note = misc_feature - Modified Amino Acid: Pen
  SITE 4: note = misc_feature - Modified Amino Acid: W7Me
  SITE 5: note = misc_feature - Modified Amino Acid: KAc
  SITE 6: note = misc_feature - Modified Amino Acid: Pen
  SITE 7: note = misc_feature - Modified Amino Acid: AEF
  SITE 8: note = misc_feature - Modified Amino Acid: Nal
  SITE 9: note = misc_feature - Modified Amino Acid: Acvc
  SITE 12: note = misc_feature - Modified Amino Acid: THP
  SITE 12: note = Mod_Res - N-terminal is: am
  REGION 1..6: note = Disulfid - Cyclic bond: Pen to Pen
XNTWKXXXXENX

SEQ ID NO: 13 - protein, 13 aa, synthetic construct
  REGION 1..13: note = Modified peptide: Ac-[(D)arg]-C-N-T-[W(7-Me)]-[Lys(Ac)]-[aMeCys]-[Phe(4-(2-am inoethoxy))]-[Nal]-[Acvc]-E-N-[THP]-NH2dR
  SITE 1: note = Mod_Res - C-terminal is: ac
  SITE 1: note = misc_feature - Modified Amino Acid: dR
  SITE 5: note = misc_feature - Modified Amino Acid: W7Me
  SITE 6: note = misc_feature - Modified Amino Acid: KAc
  SITE 7: note = misc_feature - Modified Amino Acid: aMeCys
  SITE 8: note = misc_feature - Modified Amino Acid: AEF
  SITE 9: note = misc_feature - Modified Amino Acid: Nal
  SITE 10: note = misc_feature - Modified Amino Acid: Acvc
  SITE 13: note = misc_feature - Modified Amino Acid: THP
  SITE 13: note = Mod_Res - N-terminal is: am
  REGION 2..7: note = Disulfid - Cyclic bond: C to C
RCNTWKCXXXENX

SEQ ID NO: 14 - protein, 13 aa, synthetic construct
  REGION 1..13: note = Modified peptide: Ac-[(D)arg]-[Pen]-N-T-[W(7-Me)]-[Lys(Ac)]-[Pen]-[Phe(4-(2-( Ac)aminoethoxy))]-[Nal]-[Acvc]-E-N-[THP]-NH2dR
  SITE 1: note = Mod_Res - C-terminal is: ac
  SITE 1: note = misc_feature - Modified Amino Acid: dR
  SITE 2: note = misc_feature - Modified Amino Acid: Pen
  SITE 5: note = misc_feature - Modified Amino Acid: W7Me
  SITE 6: note = misc_feature - Modified Amino Acid: KAc
  SITE 7: note = misc_feature - Modified Amino Acid: Pen
  SITE 8: note = misc_feature - Modified Amino Acid: Phe(4(2(Ac)aminoethoxy))
  SITE 9: note = misc_feature - Modified Amino Acid: Nal
  SITE 10: note = misc_feature - Modified Amino Acid: Acvc
  SITE 13: note = misc_feature - Modified Amino Acid: THP
  SITE 13: note = Mod_Res - N-terminal is: am
  REGION 2..7: note = Disulfid - Cyclic bond: Pen to Pen
RXNTWKXXXXENX

SEQ ID NO: 15 - protein, 13 aa, synthetic construct
  REGION 1..13: note = Modified peptide: Ac-[(D)arg]-[Pen]-N-T-[W(7-Me)]-[Phe(4-NHAc)]-[Pen]-[Phe(4- (2-aminoethoxy))]-[Nal]-[Acvc]-E-N-[THP]-NH2dR
  SITE 1: note = Mod_Res - C-terminal is: ac
  SITE 1: note = misc_feature - Modified Amino Acid: dR
  SITE 2: note = misc_feature - Modified Amino Acid: Pen
  SITE 5: note = misc_feature - Modified Amino Acid: W7Me
  SITE 6: note = misc_feature - Modified Amino Acid: Phe(4NHAc)
  SITE 7: note = misc_feature - Modified Amino Acid: Pen
  SITE 8: note = misc_feature - Modified Amino Acid: AEF
  SITE 9: note = misc_feature - Modified Amino Acid: Nal
  SITE 10: note = misc_feature - Modified Amino Acid: Acvc
  SITE 13: note = misc_feature - Modified Amino Acid: THP
  SITE 13: note = Mod_Res - N-terminal is: am
  REGION 2..7: note = Disulfid - Cyclic bond: Pen to Pen
RXNTWXXXXXENX

SEQ ID NO: 16 - protein, 13 aa, synthetic construct
  REGION 1..13: note = Modified peptide: Ac-[(D)arg]-[Abu]-Q-T-W-Q-C-[Phe(4-(2-aminoethoxy))]-[Nal]- [THP]-[aMeGlu]-N-H-NH2dR
  SITE 1: note = Mod_Res - C-terminal is: ac
  SITE 1: note = misc_feature - Modified Amino Acid: dR
  SITE 2: note = misc_feature - Modified Amino Acid: Abu
  SITE 8: note = misc_feature - Modified Amino Acid: AEF
  SITE 9: note = misc_feature - Modified Amino Acid: Nal
  SITE 10: note = misc_feature - Modified Amino Acid: THP
  SITE 11: note = misc_feature - Modified Amino Acid: aMeGlu
  SITE 13: note = Mod_Res - N-terminal is: am
  REGION 2..7: note = Disulfid - Cyclic bond: Abu to C
RXQTWQCXXXENH

SEQ ID NO: 17 - protein, 13 aa, synthetic construct
  REGION 1..13: note = Modified peptide: Ac-[(D)arg]-[Abu]-Q-T-W-Q-C-[Phe(4-OMe)]-[Nal]-[THP]-E-N-[b Ala]-NH2dR
  SITE 1: note = Mod_Res - C-terminal is: ac
  SITE 1: note = misc_feature - Modified Amino Acid: dR
  SITE 2: note = misc_feature - Modified Amino Acid: Abu
  SITE 8: note = misc_feature - Modified Amino Acid: F4OMe
  SITE 9: note = misc_feature - Modified Amino Acid: Nal
  SITE 10: note = misc_feature - Modified Amino Acid: THP
  SITE 13: note = misc_feature - Modified Amino Acid: bAla
  SITE 13: note = Mod_Res - N-terminal is: am
  REGION 2..7: note = Disulfid - Cyclic bond: Abu to C
RXQTWQCXXXENA

SEQ ID NO: 18 - protein, 13 aa, synthetic construct
  REGION 1..13: note = Modified peptide: Ac-[(D)arg]-[Abu]-Q-T-W-Q-C-[Phe(4-(2-aminoethoxy))]-[Nal]- [THP]-E-N-[bAla]-NH2dR
  SITE 1: note = Mod_Res - C-terminal is: ac
  SITE 1: note = misc_feature - Modified Amino Acid: dR
  SITE 2: note = misc_feature - Modified Amino Acid: Abu
  SITE 8: note = misc_feature - Modified Amino Acid: AEF
  SITE 9: note = misc_feature - Modified Amino Acid: Nal
  SITE 10: note = misc_feature - Modified Amino Acid: THP
  SITE 13: note = misc_feature - Modified Amino Acid: bAla
  SITE 13: note = Mod_Res - N-terminal is: am
  REGION 2..7: note = Disulfid - Cyclic bond: Abu to C
RXQTWQCXXXENA

SEQ ID NO: 19 - protein, 13 aa, synthetic construct
  REGION 1..13: note = Modified peptide: Ac-[(D)arg]-[Abu]-Q-T-W-Q-C-[Phe(4-(2-aminoethoxy))]-[Nal]- [Acvc]-E-N-[bAla]-NH2dR
  SITE 1: note = Mod_Res - C-terminal is: ac
  SITE 1: note = misc_feature - Modified Amino Acid: dR
  SITE 2: note = misc_feature - Modified Amino Acid: Abu
  SITE 8: note = misc_feature - Modified Amino Acid: AEF
  SITE 9: note = misc_feature - Modified Amino Acid: Nal
  SITE 10: note = misc_feature - Modified Amino Acid: Acvc
  SITE 13: note = misc_feature - Modified Amino Acid: bAla
  SITE 13: note = Mod_Res - N-terminal is: am
  REGION 2..7: note = Disulfid - Cyclic bond: Abu to C
RXQTWQCXXXENA

SEQ ID NO: 20 - protein, 12 aa, synthetic construct
  REGION 1..12: note = Modified peptide: Ac-[(D)arg]-[Abu]-Q-T-W-Q-C-[Phe(4-(2-aminoethoxy))]-[Nal]- [THP]-E-NdR
  SITE 1: note = Mod_Res - C-terminal is: ac
  SITE 1: note = misc_feature - Modified Amino Acid: dR
  SITE 2: note = misc_feature - Modified Amino Acid: Abu
  SITE 8: note = misc_feature - Modified Amino Acid: AEF
  SITE 9: note = misc_feature - Modified Amino Acid: Nal
  SITE 10: note = misc_feature - Modified Amino Acid: THP
  REGION 2..7: note = Disulfid - Cyclic bond: Abu to C
RXQTWQCXXXEN

SEQ ID NO: 21 - protein, 13 aa, synthetic construct
  REGION 1..13: note = Modified peptide: Ac-[(D)arg]-[Abu]-Q-T-W-Q-C-[Phe(4-Ad)]-[Nal]-[THP]-E-N-[bA la]-NH2dR
  SITE 1: note = Mod_Res - C-terminal is: ac
  SITE 1: note = misc_feature - Modified Amino Acid: dR
  SITE 2: note = misc_feature - Modified Amino Acid: Abu
  SITE 8: note = misc_feature - Modified Amino Acid: F4Ad
  SITE 9: note = misc_feature - Modified Amino Acid: Nal
  SITE 10: note = misc_feature - Modified Amino Acid: THP
  SITE 13: note = misc_feature - Modified Amino Acid: bAla
  SITE 13: note = Mod_Res - N-terminal is: am
  REGION 2..7: note = Disulfid - Cyclic bond: Abu to C
RXQTWQCXXXENA

SEQ ID NO: 22 - protein, 13 aa, synthetic construct
  REGION 1..13: note = Modified peptide: Ac-[(D)arg]-[Abu]-Q-T-W-Q-C-[Phe(4-(2-(Ac)aminoethoxy))]-[N al]-[THP]-E-N-[bAla]-NH2dR
  SITE 1: note = Mod_Res - C-terminal is: ac
  SITE 1: note = misc_feature - Modified Amino Acid: dR
  SITE 2: note = misc_feature - Modified Amino Acid: Abu
  SITE 8: note = misc_feature - Modified Amino Acid: Phe(4(2(Ac)aminoethoxy))
  SITE 9: note = misc_feature - Modified Amino Acid: Nal
  SITE 10: note = misc_feature - Modified Amino Acid: THP
  SITE 13: note = misc_feature - Modified Amino Acid: bAla
  SITE 13: note = Mod_Res - N-terminal is: am
  REGION 2..7: note = Disulfid - Cyclic bond: Abu to C
RXQTWQCXXXENA

SEQ ID NO: 23 - protein, 13 aa, synthetic construct
  REGION 1..13: note = Modified peptide: Ac-[(D)arg]-[Abu]-Q-T-W-Q-C-[Phe(4-(2-aminoethoxy))]-[Nal]- [THP]-[aMeGlu]-N-[bAla]-NH2dR
  SITE 1: note = Mod_Res - C-terminal is: ac
  SITE 1: note = misc_feature - Modified Amino Acid: dR
  SITE 2: note = misc_feature - Modified Amino Acid: Abu
  SITE 8: note = misc_feature - Modified Amino Acid: AEF
  SITE 9: note = misc_feature - Modified Amino Acid: Nal
  SITE 10: note = misc_feature - Modified Amino Acid: THP
  SITE 11: note = misc_feature - Modified Amino Acid: aMeGlu
  SITE 13: note = misc_feature - Modified Amino Acid: bAla
  SITE 13: note = Mod_Res - N-terminal is: am
  REGION 2..7: note = Disulfid - Cyclic bond: Abu to C
RXQTWQCXXXENA

SEQ ID NO: 24 - protein, 13 aa, synthetic construct
  REGION 1..13: note = Modified peptide: Ac-[(D)arg]-[Pen]-Q-T-W-Q-[Pen]-[Phe(4-(2-aminoethoxy))]-[N al]-[THP]-[aMeGlu]-N-[bAla]-NH2dR
  SITE 1: note = Mod_Res - C-terminal is: ac
  SITE 1: note = misc_feature - Modified Amino Acid: dR
  SITE 2: note = misc_feature - Modified Amino Acid: Pen
  SITE 7: note = misc_feature - Modified Amino Acid: Pen
  SITE 8: note = misc_feature - Modified Amino Acid: AEF
  SITE 9: note = misc_feature - Modified Amino Acid: Nal
  SITE 10: note = misc_feature - Modified Amino Acid: THP
  SITE 11: note = misc_feature - Modified Amino Acid: aMeGlu
  SITE 13: note = misc_feature - Modified Amino Acid: bAla
  SITE 13: note = Mod_Res - N-terminal is: am
  REGION 2..7: note = Disulfid - Cyclic bond: Pen to Pen
RXQTWQXXXXENA

SEQ ID NO: 25 - protein, 13 aa, synthetic construct
  REGION 1..13: note = Modified peptide: Ac-[(D)arg]-[Pen]-Q-T-W-Q-[Pen]-[Phe(4-(2-aminoethoxy))]-[N al]-[THP]-[Lys(Ac)]-N-[bAla]-NH2dR
  SITE 1: note = Mod_Res - C-terminal is: ac
  SITE 1: note = misc_feature - Modified Amino Acid: dR
  SITE 2: note = misc_feature - Modified Amino Acid: Pen
  SITE 7: note = misc_feature - Modified Amino Acid: Pen
  SITE 8: note = misc_feature - Modified Amino Acid: AEF
  SITE 9: note = misc_feature - Modified Amino Acid: Nal
  SITE 10: note = misc_feature - Modified Amino Acid: THP
  SITE 11: note = misc_feature - Modified Amino Acid: KAc
  SITE 13: note = misc_feature - Modified Amino Acid: bAla
  SITE 13: note = Mod_Res - N-terminal is: am
  REGION 2..7: note = Disulfid - Cyclic bond: Pen to Pen
RXQTWQXXXXKNA

SEQ ID NO: 26 - protein, 13 aa, synthetic construct
  REGION 1..13: note = Modified peptide: [Propionic_acid]-[(D)arg]-[Pen]-Q-T-W-Q-[Pen]-[Phe(4-(2-ami noethoxy))]-[Nal]-[THP]-E-N-N-NH2dR
  SITE 1: note = Mod_Res - C-terminal is: Propionic_acid
  SITE 1: note = misc_feature - Modified Amino Acid: dR
  SITE 2: note = misc_feature - Modified Amino Acid: Pen
  SITE 7: note = misc_feature - Modified Amino Acid: Pen
  SITE 8: note = misc_feature - Modified Amino Acid: AEF
  SITE 9: note = misc_feature - Modified Amino Acid: Nal
  SITE 10: note = misc_feature - Modified Amino Acid: THP
  SITE 13: note = Mod_Res - N-terminal is: am
  REGION 2..7: note = Disulfid - Cyclic bond: Pen to Pen
RXQTWQXXXXENN

SEQ ID NO: 27 - protein, 13 aa, synthetic construct
  REGION 1..13: note = Modified peptide: Ac-[(D)arg]-[Pen]-Q-T-W-Q-[Pen]-[Phe(4-(2-aminoethoxy))]-[N al]-[THP]-E-N-[bAla]-NH2dR
  SITE 1: note = Mod_Res - C-terminal is: ac
  SITE 1: note = misc_feature - Modified Amino Acid: dR
  SITE 2: note = misc_feature - Modified Amino Acid: Pen
  SITE 7: note = misc_feature - Modified Amino Acid: Pen
  SITE 8: note = misc_feature - Modified Amino Acid: AEF
  SITE 9: note = misc_feature - Modified Amino Acid: Nal
  SITE 10: note = misc_feature - Modified Amino Acid: THP
  SITE 13: note = misc_feature - Modified Amino Acid: bAla
  SITE 13: note = Mod_Res - N-terminal is: am
  REGION 2..7: note = Disulfid - Cyclic bond: Pen to Pen
RXQTWQXXXXENA

SEQ ID NO: 28 - protein, 12 aa, synthetic construct
  REGION 1..12: note = Modified peptide: Ac-[Abu]-Q-T-[W(7-Me)]-Q-C-[Phe(4-(2-aminoethoxy))]-[Nal]-[ THP]-[Lys(Ac)]-N-N-NH2
  SITE 1: note = Mod_Res - C-terminal is: ac
  SITE 1: note = misc_feature - Modified Amino Acid: Abu
  SITE 4: note = misc_feature - Modified Amino Acid: W7Me
  SITE 7: note = misc_feature - Modified Amino Acid: ac
  SITE 8: note = misc_feature - Modified Amino Acid: Nal
  SITE 9: note = misc_feature - Modified Amino Acid: THP
  SITE 10: note = misc_feature - Modified Amino Acid: KAc
  SITE 12: note = Mod_Res - N-terminal is: am
  REGION 1..6: note = Disulfid - Cyclic bond: Abu to C
XQTWQCXXXKNN

SEQ ID NO: 29 - protein, 13 aa, synthetic construct
  REGION 1..13: note = Modified peptide: Ac-[(D)arg]-[Abu]-Q-T-[W(7-Me)]-Q-C-[Phe(4-(2-aminoethoxy)) ]-[Nal]-[THP]-[Lys(Ac)]-N-N-NH2dR
  SITE 1: note = Mod_Res - C-terminal is: ac
  SITE 1: note = misc_feature - Modified Amino Acid: dR
  SITE 2: note = misc_feature - Modified Amino Acid: Abu
  SITE 5: note = misc_feature - Modified Amino Acid: W7Me
  SITE 8: note = misc_feature - Modified Amino Acid: AEF
  SITE 9: note = misc_feature - Modified Amino Acid: Nal
  SITE 10: note = misc_feature - Modified Amino Acid: THP
  SITE 11: note = misc_feature - Modified Amino Acid: KAc
  SITE 13: note = Mod_Res - N-terminal is: am
  REGION 2..7: note = Disulfid - Cyclic bond: Abu to C
RXQTWQCXXXKNN

SEQ ID NO: 30 - protein, 12 aa, synthetic construct
  REGION 1..12: note = Modified peptide: Ac-[Abu]-Q-T-[W(7-Me)]-Q-C-[Phe(4-(2-aminoethoxy))]-[Nal]-[ THP]-E-N-N-NH2
  SITE 1: note = Mod_Res - C-terminal is: ac
  SITE 1: note = misc_feature - Modified Amino Acid: Abu
  SITE 4: note = misc_feature - Modified Amino Acid: W7Me
  SITE 7: note = misc_feature - Modified Amino Acid: AEF
  SITE 8: note = misc_feature - Modified Amino Acid: Nal
  SITE 9: note = misc_feature - Modified Amino Acid: THP
  SITE 12: note = Mod_Res - N-terminal is: am
  REGION 1..6: note = Disulfid - Cyclic bond: Abu to C
XQTWQCXXXENN

SEQ ID NO: 31 - protein, 13 aa, synthetic construct
  REGION 1..13: note = Modified peptide: Ac-[(D)arg]-[Abu]-Q-T-[W(7-Me)]-Q-C-[Phe(4-(2-aminoethoxy)) ]-[Nal]-[THP]-E-N-N-NH2dR
  SITE 1: note = Mod_Res - C-terminal is: ac
  SITE 1: note = misc_feature - Modified Amino Acid: dR
  SITE 2: note = misc_feature - Modified Amino Acid: Abu
  SITE 5: note = misc_feature - Modified Amino Acid: W7Me
  SITE 8: note = misc_feature - Modified Amino Acid: AEF
  SITE 9: note = misc_feature - Modified Amino Acid: Nal
  SITE 10: note = misc_feature - Modified Amino Acid: THP
  SITE 13: note = Mod_Res - N-terminal is: am
  REGION 2..7: note = Disulfid - Cyclic bond: Abu to C
RXQTWQCXXXENN

SEQ ID NO: 32 - protein, 11 aa, synthetic construct
  REGION 1..11: note = Modified peptide: Ac-[Pen]-L-T-[W(7-Me)]-[Lys(Ac_Morph)]-[Pen]-[Phe(4-OMe)]-[ Nal]-[aMeLeu]-L-N-[NH(2-(pyridin-3-yl)ethyl)]
  SITE 1: note = Mod_Res - C-terminal is: ac
  SITE 1: note = misc_feature - Modified Amino Acid: Pen
  SITE 4: note = misc_feature - Modified Amino Acid: W7Me
  SITE 5: note = misc_feature - Modified Amino Acid: KAcMorph
  SITE 6: note = misc_feature - Modified Amino Acid: Pen
  SITE 7: note = misc_feature - Modified Amino Acid: F4OMe
  SITE 8: note = misc_feature - Modified Amino Acid: Nal
  SITE 9: note = misc_feature - Modified Amino Acid: aMeLeu
  SITE 11: note = Mod_Res - N-terminal is: NH(2-(pyridin3-l)ethyl)
  REGION 1..6: note = Disulfid - Cyclic bond: Pen to Pen
XLTWXXXXLLN

SEQ ID NO: 33 - protein, 12 aa, synthetic construct
  REGION 1..12: note = Modified peptide: Ac-[Lys(Ac_Morph)]-[Pen]-L-T-[W(7-Me)]-[Lys(Ac)]-[Pen]-[Phe (4-OMe)]-[Nal]-[aMeLeu]-L-N-[NH(2-(pyridin-3-yl)ethyl)]K(Ac Morph)
  SITE 1: note = Mod_Res - C-terminal is: ac
  SITE 1: note = misc_feature - Modified Amino Acid: KAcMorp
  SITE 2: note = misc_feature - Modified Amino Acid: Pen
  SITE 5: note = misc_feature - Modified Amino Acid: W7Me
  SITE 6: note = misc_feature - Modified Amino Acid: KAc
  SITE 7: note = misc_feature - Modified Amino Acid: Pen
  SITE 8: note = misc_feature - Modified Amino Acid: F4OMe
  SITE 9: note = misc_feature - Modified Amino Acid: Nal
  SITE 10: note = misc_feature - Modified Amino Acid: aMeLeu
  SITE 12: note = Mod_Res - N-terminal is: NH(2-(pyridin3-l)ethyl)
  REGION 2..7: note = Disulfid - Cyclic bond: Pen to Pen
XXLTWKXXXLLN

SEQ ID NO: 34 - protein, 11 aa, synthetic construct
  REGION 1..11: note = Modified peptide: Ac-[Pen]-L-T-[W(7-Me)]-[Lys(Ac_Morph)]-[Pen]-F-[Nal]-[aMeLe u]-L-N-[NH(2-(pyridin-3-yl)ethyl)]
  SITE 1: note = Mod_Res - C-terminal is: ac
  SITE 1: note = misc_feature - Modified Amino Acid: Pen
  SITE 4: note = misc_feature - Modified Amino Acid: W7Me
  SITE 5: note = misc_feature - Modified Amino Acid: KAcMorph
  SITE 6: note = misc_feature - Modified Amino Acid: Pen
  SITE 8: note = misc_feature - Modified Amino Acid: Nal
  SITE 9: note = misc_feature - Modified Amino Acid: aMeLeu
  SITE 11: note = Mod_Res - N-terminal is: NH(2-(pyridin3-l)ethyl)
  REGION 1..6: note = Disulfid - Cyclic bond: Pen to Pen
XLTWXXFXLLN

SEQ ID NO: 35 - protein, 12 aa, synthetic construct
  REGION 1..12: note = Modified peptide: Ac-[Lys(Ac_Morph)]-[Pen]-L-T-[W(7-Me)]-[Lys(Ac)]-[Pen]-F-[N al]-[aMeLeu]-L-N-[NH(2-(pyridin-3-yl)ethyl)]K(AcMorph)
  SITE 1: note = Mod_Res - C-terminal is: ac
  SITE 1: note = misc_feature - Modified Amino Acid: KAcMorp
  SITE 2: note = misc_feature - Modified Amino Acid: Pen
  SITE 5: note = misc_feature - Modified Amino Acid: W7Me
  SITE 6: note = misc_feature - Modified Amino Acid: KAc
  SITE 7: note = misc_feature - Modified Amino Acid: Pen
  SITE 9: note = misc_feature - Modified Amino Acid: Nal
  SITE 10: note = misc_feature - Modified Amino Acid: aMeLeu
  SITE 12: note = Mod_Res - N-terminal is: NH(2-(pyridin3-l)ethyl)
  REGION 2..7: note = Disulfid - Cyclic bond: Pen to Pen
XXLTWKXFXLLN

SEQ ID NO: 36 - protein, 13 aa, synthetic construct
  REGION 1..13: note = Modified peptide: Ac-[Pen]-L-T-[W(7-Me)]-[Lys(Ac_Morph)]-[Pen]-[Phe(4-OMe)]-[ Nal]-[aMeLeu]-L-N-[3Pal]-[Sarc]-NH2
  SITE 1: note = Mod_Res - C-terminal is: ac
  SITE 1: note = misc_feature - Modified Amino Acid: Pen
  SITE 4: note = misc_feature - Modified Amino Acid: W7Me
  SITE 5: note = misc_feature - Modified Amino Acid: KAcMorph
  SITE 6: note = misc_feature - Modified Amino Acid: Pen
  SITE 7: note = misc_feature - Modified Amino Acid: F4OMe
  SITE 8: note = misc_feature - Modified Amino Acid: Nal
  SITE 9: note = misc_feature - Modified Amino Acid: aMeLeu
  SITE 12: note = misc_feature - Modified Amino Acid: 3Pya
  SITE 13: note = misc_feature - Modified Amino Acid: MeGly
  SITE 13: note = Mod_Res - N-terminal is: am
  REGION 1..6: note = Disulfid - Cyclic bond: Pen to Pen
XLTWXXXXLLNXG

SEQ ID NO: 37 - protein, 13 aa, synthetic construct
  REGION 1..13: note = Modified peptide: [Ac_Morph]-[Pen]-L-T-[W(7-Me)]-[Lys(Ac)]-[Pen]-[Phe(4-OMe)] -[Nal]-[aMeLeu]-L-N-[3Pal]-[Sarc]-NH2
  SITE 1: note = Mod_Res - C-terminal is: Ac_Morph
  SITE 1: note = misc_feature - Modified Amino Acid: Pen
  SITE 4: note = misc_feature - Modified Amino Acid: W7Me
  SITE 5: note = misc_feature - Modified Amino Acid: KAc
  SITE 6: note = misc_feature - Modified Amino Acid: Pen
  SITE 7: note = misc_feature - Modified Amino Acid: F4OMe
  SITE 8: note = misc_feature - Modified Amino Acid: Nal
  SITE 9: note = misc_feature - Modified Amino Acid: aMeLeu
  SITE 12: note = misc_feature - Modified Amino Acid: 3Pya
  SITE 13: note = misc_feature - Modified Amino Acid: MeGly
  SITE 13: note = Mod_Res - N-terminal is: am
  REGION 1..6: note = Disulfid - Cyclic bond: Pen to Pen
XLTWKXXXLLNXG

SEQ ID NO: 38 - protein, 13 aa, synthetic construct
  REGION 1..13: note = Modified peptide: Ac-[Pen]-N-T-[W(7-Me)]-[Lys(Ac_Morph)]-[Pen]-[Phe(4-OMe)]-[ Nal]-[aMeLeu]-L-N-[3Pal]-[Sarc]-NH2
  SITE 1: note = Mod_Res - C-terminal is: ac
  SITE 1: note = misc_feature - Modified Amino Acid: Pen
  SITE 4: note = misc_feature - Modified Amino Acid: W7Me
  SITE 5: note = misc_feature - Modified Amino Acid: KAcMorph
  SITE 6: note = misc_feature - Modified Amino Acid: Pen
  SITE 7: note = misc_feature - Modified Amino Acid: F4OMe
  SITE 8: note = misc_feature - Modified Amino Acid: Nal
  SITE 9: note = misc_feature - Modified Amino Acid: aMeLeu
  SITE 12: note = misc_feature - Modified Amino Acid: 3Pya
  SITE 13: note = misc_feature - Modified Amino Acid: MeGly
  SITE 13: note = Mod_Res - N-terminal is: am
  REGION 1..6: note = Disulfid - Cyclic bond: Pen to Pen
XNTWXXXXLLNXG

SEQ ID NO: 39 - protein, 14 aa, synthetic construct
  REGION 1..14: note = Modified peptide: Ac-[Lys(Ac_Morph)]-[Pen]-L-T-[W(7-Me)]-[Lys(Ac)]-[Pen]-[Phe (4-OMe)]-[Nal]-[aMeLeu]-L-N-[3Pal]-[Sarc]-NH2K(AcMorph)
  SITE 1: note = Mod_Res - C-terminal is: ac
  SITE 1: note = misc_feature - Modified Amino Acid: KAcMorp
  SITE 2: note = misc_feature - Modified Amino Acid: Pen
  SITE 5: note = misc_feature - Modified Amino Acid: W7Me
  SITE 6: note = misc_feature - Modified Amino Acid: KAc
  SITE 7: note = misc_feature - Modified Amino Acid: Pen
  SITE 8: note = misc_feature - Modified Amino Acid: F4OMe
  SITE 9: note = misc_feature - Modified Amino Acid: Nal
  SITE 10: note = misc_feature - Modified Amino Acid: aMeLeu
  SITE 13: note = misc_feature - Modified Amino Acid: 3Pya
  SITE 14: note = misc_feature - Modified Amino Acid: MeGly
  SITE 14: note = Mod_Res - N-terminal is: am
  REGION 2..7: note = Disulfid - Cyclic bond: Pen to Pen
XXLTWKXXXLLNXG

SEQ ID NO: 40 - protein, 14 aa, synthetic construct
  REGION 1..14: note = Modified peptide: Ac-[Lys(Ac_Morph)]-[Pen]-N-T-[W(7-Me)]-[Lys(Ac)]-[Pen]-[Phe (4-OMe)]-[Nal]-[aMeLeu]-L-N-[3Pal]-[Sarc]-NH2K(AcMorph)
  SITE 1: note = Mod_Res - C-terminal is: ac
  SITE 1: note = misc_feature - Modified Amino Acid: KAcMorp
  SITE 2: note = misc_feature - Modified Amino Acid: Pen
  SITE 5: note = misc_feature - Modified Amino Acid: W7Me
  SITE 6: note = misc_feature - Modified Amino Acid: KAc
  SITE 7: note = misc_feature - Modified Amino Acid: Pen
  SITE 8: note = misc_feature - Modified Amino Acid: F4OMe
  SITE 9: note = misc_feature - Modified Amino Acid: Nal
  SITE 10: note = misc_feature - Modified Amino Acid: aMeLeu
  SITE 13: note = misc_feature - Modified Amino Acid: 3Pya
  SITE 14: note = misc_feature - Modified Amino Acid: MeGly
  SITE 14: note = Mod_Res - N-terminal is: am
  REGION 2..7: note = Disulfid - Cyclic bond: Pen to Pen
XXNTWKXXXLLNXG

SEQ ID NO: 41 - protein, 13 aa, synthetic construct
  REGION 1..13: note = Modified peptide: [Ac_Morph]-[Pen]-N-T-[W(7-Me)]-[Lys(Ac)]-[Pen]-F-[Nal]-[aMe Leu]-L-N-[3Pal]-[Sarc]-NH2
  SITE 1: note = Mod_Res - C-terminal is: Ac_Morph
  SITE 1: note = misc_feature - Modified Amino Acid: Pen
  SITE 4: note = misc_feature - Modified Amino Acid: W7Me
  SITE 5: note = misc_feature - Modified Amino Acid: KAc
  SITE 6: note = misc_feature - Modified Amino Acid: Pen
  SITE 8: note = misc_feature - Modified Amino Acid: Nal
  SITE 9: note = misc_feature - Modified Amino Acid: aMeLeu
  SITE 12: note = misc_feature - Modified Amino Acid: 3Pya
  SITE 13: note = misc_feature - Modified Amino Acid: MeGly
  SITE 13: note = Mod_Res - N-terminal is: am
  REGION 1..6: note = Disulfid - Cyclic bond: Pen to Pen
XNTWKXFXLLNXG

SEQ ID NO: 42 - protein, 13 aa, synthetic construct
  REGION 1..13: note = Modified peptide: Ac-[Pen]-N-T-[W(7-Me)]-[Lys(Ac_Morph)]-[Pen]-F-[Nal]-[aMeLe u]-L-N-[3Pal]-[Sarc]-NH2
  SITE 1: note = Mod_Res - C-terminal is: ac
  SITE 1: note = misc_feature - Modified Amino Acid: Pen
  SITE 4: note = misc_feature - Modified Amino Acid: W7Me
  SITE 5: note = misc_feature - Modified Amino Acid: KAcMorph
  SITE 6: note = misc_feature - Modified Amino Acid: Pen
  SITE 8: note = misc_feature - Modified Amino Acid: Nal
  SITE 9: note = misc_feature - Modified Amino Acid: aMeLeu
  SITE 12: note = misc_feature - Modified Amino Acid: 3Pya
  SITE 13: note = misc_feature - Modified Amino Acid: MeGly
  SITE 13: note = Mod_Res - N-terminal is: am
  REGION 1..6: note = Disulfid - Cyclic bond: Pen to Pen
XNTWXXFXLLNXG

SEQ ID NO: 43 - protein, 13 aa, synthetic construct
  REGION 1..13: note = Modified peptide: [Ac_Morph]-[Pen]-L-T-[W(7-Me)]-[Lys(Ac)]-[Pen]-F-[Nal]-[aMe Leu]-L-N-[3Pal]-[Sarc]-NH2
  SITE 1: note = Mod_Res - C-terminal is: Ac_Morph
  SITE 1: note = misc_feature - Modified Amino Acid: Pen
  SITE 4: note = misc_feature - Modified Amino Acid: W7Me
  SITE 5: note = misc_feature - Modified Amino Acid: KAc
  SITE 6: note = misc_feature - Modified Amino Acid: Pen
  SITE 8: note = misc_feature - Modified Amino Acid: Nal
  SITE 9: note = misc_feature - Modified Amino Acid: aMeLeu
  SITE 12: note = misc_feature - Modified Amino Acid: 3Pya
  SITE 13: note = misc_feature - Modified Amino Acid: MeGly
  SITE 13: note = Mod_Res - N-terminal is: am
  REGION 1..6: note = Disulfid - Cyclic bond: Pen to Pen
XLTWKXFXLLNXG

SEQ ID NO: 44 - protein, 13 aa, synthetic construct
  REGION 1..13: note = Modified peptide: Ac-[Pen]-L-T-[W(7-Me)]-[Lys(Ac_Morph)]-[Pen]-F-[Nal]-[aMeLe u]-L-N-[3Pal]-[Sarc]-NH2
  SITE 1: note = Mod_Res - C-terminal is: ac
  SITE 1: note = misc_feature - Modified Amino Acid: Pen
  SITE 4: note = misc_feature - Modified Amino Acid: W7Me
  SITE 5: note = misc_feature - Modified Amino Acid: KAcMorph
  SITE 6: note = misc_feature - Modified Amino Acid: Pen
  SITE 8: note = misc_feature - Modified Amino Acid: Nal
  SITE 9: note = misc_feature - Modified Amino Acid: aMeLeu
  SITE 12: note = misc_feature - Modified Amino Acid: 3Pya
  SITE 13: note = misc_feature - Modified Amino Acid: MeGly
  SITE 13: note = Mod_Res - N-terminal is: am
  REGION 1..6: note = Disulfid - Cyclic bond: Pen to Pen
XLTWXXFXLLNXG

SEQ ID NO: 45 - protein, 13 aa, synthetic construct
  REGION 1..13: note = Modified peptide: Ac-[Pen]-N-T-[W(7-Me)]-[Lys(Ac)]-[Pen]-F-[Nal]-[Spiral_Pip_ Ac]-[Lys(Ac)]-N-[3Pal]-[Sarc]-NH2
  SITE 1: note = Mod_Res - C-terminal is: ac
  SITE 1: note = misc_feature - Modified Amino Acid: Pen
  SITE 4: note = misc_feature - Modified Amino Acid: W7Me
  SITE 5: note = misc_feature - Modified Amino Acid: KAc
  SITE 6: note = misc_feature - Modified Amino Acid: Pen
  SITE 8: note = misc_feature - Modified Amino Acid: Nal
  SITE 9: note = misc_feature - Modified Amino Acid: Spiral_Pip_Ac
  SITE 10: note = misc_feature - Modified Amino Acid: KAc
  SITE 12: note = misc_feature - Modified Amino Acid: 3Pya
  SITE 13: note = misc_feature - Modified Amino Acid: MeGly
  SITE 13: note = Mod_Res - N-terminal is: am
  REGION 1..6: note = Disulfid - Cyclic bond: Pen to Pen
XNTWKXFXXKNXG

SEQ ID NO: 46 - protein, 13 aa, synthetic construct
  REGION 1..13: note = Modified peptide: Ac-[Pen]-L-T-[W(7-Me)]-[Lys(Ac)]-[Pen]-F-[Nal]-[aMeLeu]-L-N -[3Pal]-[Sarc]-NH2
  SITE 1: note = Mod_Res - C-terminal is: ac
  SITE 1: note = misc_feature - Modified Amino Acid: Pen
  SITE 4: note = misc_feature - Modified Amino Acid: W7Me
  SITE 5: note = misc_feature - Modified Amino Acid: KAc
  SITE 6: note = misc_feature - Modified Amino Acid: Pen
  SITE 8: note = misc_feature - Modified Amino Acid: Nal
  SITE 9: note = misc_feature - Modified Amino Acid: aMeLeu
  SITE 12: note = misc_feature - Modified Amino Acid: 3Pya
  SITE 13: note = misc_feature - Modified Amino Acid: MeGly
  SITE 13: note = Mod_Res - N-terminal is: am
  REGION 1..6: note = Disulfid - Cyclic bond: Pen to Pen
XLTWKXFXLLNXG

SEQ ID NO: 47 - protein, 13 aa, synthetic construct
  REGION 1..13: note = Modified peptide: Ac-[Pen]-N-T-[W(4-F-7-Me)]-[Lys(Ac)]-[Pen]-[Phe(4-(2-aminoe thoxy))]-[Nal]-[THP]-[Lys(Ac)]-N-[3Pal]-[Sarc]-NH2
  SITE 1: note = Mod_Res - C-terminal is: ac
  SITE 1: note = misc_feature - Modified Amino Acid: Pen
  SITE 4: note = misc_feature - Modified Amino Acid: W(4F7Me)
  SITE 5: note = misc_feature - Modified Amino Acid: KAc
  SITE 6: note = misc_feature - Modified Amino Acid: Pen
  SITE 7: note = misc_feature - Modified Amino Acid: AEF
  SITE 8: note = misc_feature - Modified Amino Acid: Nal
  SITE 9: note = misc_feature - Modified Amino Acid: THP
  SITE 10: note = misc_feature - Modified Amino Acid: KAc
  SITE 12: note = misc_feature - Modified Amino Acid: 3Pya
  SITE 13: note = misc_feature - Modified Amino Acid: MeGly
  SITE 13: note = Mod_Res - N-terminal is: am
  REGION 1..6: note = Disulfid - Cyclic bond: Pen to Pen
XNTWKXXXXKNXG

SEQ ID NO: 48 - protein, 13 aa, synthetic construct
  REGION 1..13: note = Modified peptide: Ac-[Pen]-N-T-[W(4-F-7-Me)]-[Lys(Ac)]-[Pen]-[Phe(4-(2-aminoe thoxy))]-[Nal]-[THP]-E-N-[3Pal]-[Sarc]-NH2
  SITE 1: note = Mod_Res - C-terminal is: ac
  SITE 1: note = misc_feature - Modified Amino Acid: Pen
  SITE 4: note = misc_feature - Modified Amino Acid: W(4F7Me)
  SITE 5: note = misc_feature - Modified Amino Acid: KAc
  SITE 6: note = misc_feature - Modified Amino Acid: Pen
  SITE 7: note = misc_feature - Modified Amino Acid: AEF
  SITE 8: note = misc_feature - Modified Amino Acid: Nal
  SITE 9: note = misc_feature - Modified Amino Acid: THP
  SITE 12: note = misc_feature - Modified Amino Acid: 3Pya
  SITE 13: note = misc_feature - Modified Amino Acid: MeGly
  SITE 13: note = Mod_Res - N-terminal is: am
  REGION 1..6: note = Disulfid - Cyclic bond: Pen to Pen
XNTWKXXXXENXG

SEQ ID NO: 49 - protein, 13 aa, synthetic construct
  REGION 1..13: note = Modified peptide: Ac-[Pen]-[N-MeAsn]-T-[W(7-Me)]-[Lys(Ac)]-[Pen]-F-[Nal]-[THP ]-[Lys(Ac)]-N-[3Pal]-[Sarc]-NH2
  SITE 1: note = Mod_Res - C-terminal is: ac
  SITE 1: note = misc_feature - Modified Amino Acid: Pen
  SITE 2: note = misc_feature - Modified Amino Acid: N-MeAsn
  SITE 4: note = misc_feature - Modified Amino Acid: W7Me
  SITE 5: note = misc_feature - Modified Amino Acid: KAc
  SITE 6: note = misc_feature - Modified Amino Acid: Pen
  SITE 8: note = misc_feature - Modified Amino Acid: Nal
  SITE 9: note = misc_feature - Modified Amino Acid: THP
  SITE 10: note = misc_feature - Modified Amino Acid: KAc
  SITE 12: note = misc_feature - Modified Amino Acid: 3Pya
  SITE 13: note = misc_feature - Modified Amino Acid: MeGly
  SITE 13: note = Mod_Res - N-terminal is: am
  REGION 1..6: note = Disulfid - Cyclic bond: Pen to Pen
XNTWKXFXXKNXG

SEQ ID NO: 50 - protein, 14 aa, synthetic construct
  REGION 1..14: note = Modified peptide: Ac-[Lys(Ac_Morph)]-[Pen]-N-T-[W(7-Me)]-[Lys(Ac)]-[Pen]-F-[N al]-[aMeLeu]-L-N-[3Pal]-[Sarc]-NH2K(AcMorph)
  SITE 1: note = Mod_Res - C-terminal is: ac
  SITE 1: note = misc_feature - Modified Amino Acid: KAcMorp
  SITE 2: note = misc_feature - Modified Amino Acid: Pen
  SITE 5: note = misc_feature - Modified Amino Acid: W7Me
  SITE 6: note = misc_feature - Modified Amino Acid: KAc
  SITE 7: note = misc_feature - Modified Amino Acid: Pen
  SITE 9: note = misc_feature - Modified Amino Acid: Nal
  SITE 10: note = misc_feature - Modified Amino Acid: aMeLeu
  SITE 13: note = misc_feature - Modified Amino Acid: 3Pya
  SITE 14: note = misc_feature - Modified Amino Acid: MeGly
  SITE 14: note = Mod_Res - N-terminal is: am
  REGION 2..7: note = Disulfid - Cyclic bond: Pen to Pen
XXNTWKXFXLLNXG

SEQ ID NO: 51 - protein, 14 aa, synthetic construct
  REGION 1..14: note = Modified peptide: Ac-[Lys(Ac_Morph)]-[Pen]-L-T-[W(7-Me)]-[Lys(Ac)]-[Pen]-F-[N al]-[aMeLeu]-L-N-[3Pal]-[Sarc]-NH2K(AcMorph)
  SITE 1: note = Mod_Res - C-terminal is: ac
  SITE 1: note = misc_feature - Modified Amino Acid: KAcMorp
  SITE 2: note = misc_feature - Modified Amino Acid: Pen
  SITE 5: note = misc_feature - Modified Amino Acid: W7Me
  SITE 6: note = misc_feature - Modified Amino Acid: KAc
  SITE 7: note = misc_feature - Modified Amino Acid: Pen
  SITE 9: note = misc_feature - Modified Amino Acid: Nal
  SITE 10: note = misc_feature - Modified Amino Acid: aMeLeu
  SITE 13: note = misc_feature - Modified Amino Acid: 3Pya
  SITE 14: note = misc_feature - Modified Amino Acid: MeGly
  SITE 14: note = Mod_Res - N-terminal is: am
  REGION 2..7: note = Disulfid - Cyclic bond: Pen to Pen
XXLTWKXFXLLNXG

SEQ ID NO: 52 - protein, 13 aa, synthetic construct
  REGION 1..13: note = Modified peptide: Ac-[Pen]-N-T-[W(7-Me)]-[Lys(Ac)]-[Pen]-F-[Nal]-[Spiral_Pip] -[Lys(Ac)]-N-[3Pal]-[Sarc]-NH2
  SITE 1: note = Mod_Res - C-terminal is: ac
  SITE 1: note = misc_feature - Modified Amino Acid: Pen
  SITE 4: note = misc_feature - Modified Amino Acid: W7Me
  SITE 5: note = misc_feature - Modified Amino Acid: KAc
  SITE 6: note = misc_feature - Modified Amino Acid: Pen
  SITE 8: note = misc_feature - Modified Amino Acid: Nal
  SITE 9: note = misc_feature - Modified Amino Acid: Spiral_Pip
  SITE 10: note = misc_feature - Modified Amino Acid: KAc
  SITE 12: note = misc_feature - Modified Amino Acid: 3Pya
  SITE 13: note = misc_feature - Modified Amino Acid: MeGly
  SITE 13: note = Mod_Res - N-terminal is: am
  REGION 1..6: note = Disulfid - Cyclic bond: Pen to Pen
XNTWKXFXXKNXG

SEQ ID NO: 53 - protein, 13 aa, synthetic construct
  REGION 1..13: note = Modified peptide: Ac-[Pen]-N-T-[W(7-Me)]-[Lys(Ac)]-[Pen]-[Phe(4-Me)]-[Nal]-[T HP]-E-L-[3Pal]-[Sarc]-NH2
  SITE 1: note = Mod_Res - C-terminal is: ac
  SITE 1: note = misc_feature - Modified Amino Acid: Pen
  SITE 4: note = misc_feature - Modified Amino Acid: W7Me
  SITE 5: note = misc_feature - Modified Amino Acid: KAc
  SITE 6: note = misc_feature - Modified Amino Acid: Pen
  SITE 7: note = misc_feature - Modified Amino Acid: F4Me
  SITE 8: note = misc_feature - Modified Amino Acid: Nal
  SITE 9: note = misc_feature - Modified Amino Acid: THP
  SITE 12: note = misc_feature - Modified Amino Acid: 3Pya
  SITE 13: note = misc_feature - Modified Amino Acid: MeGly
  SITE 13: note = Mod_Res - N-terminal is: am
  REGION 1..6: note = Disulfid - Cyclic bond: Pen to Pen
XNTWKXXXXELXG

SEQ ID NO: 54 - protein, 13 aa, synthetic construct
  REGION 1..13: note = Modified peptide: Ac-[Pen]-N-T-[W(7-Me)]-[Lys(Ac)]-[Pen]-[Phe(4-Me)]-[Nal]-[T HP]-[Lys(Ac)]-L-[3Pal]-[Sarc]-NH2
  SITE 1: note = Mod_Res - C-terminal is: ac
  SITE 1: note = misc_feature - Modified Amino Acid: Pen
  SITE 4: note = misc_feature - Modified Amino Acid: W7Me
  SITE 5: note = misc_feature - Modified Amino Acid: KAc
  SITE 6: note = misc_feature - Modified Amino Acid: Pen
  SITE 7: note = misc_feature - Modified Amino Acid: F4Me
  SITE 8: note = misc_feature - Modified Amino Acid: Nal
  SITE 9: note = misc_feature - Modified Amino Acid: THP
  SITE 10: note = misc_feature - Modified Amino Acid: KAc
  SITE 12: note = misc_feature - Modified Amino Acid: 3Pya
  SITE 13: note = misc_feature - Modified Amino Acid: MeGly
  SITE 13: note = Mod_Res - N-terminal is: am
  REGION 1..6: note = Disulfid - Cyclic bond: Pen to Pen
XNTWKXXXXKLXG

SEQ ID NO: 55 - protein, 13 aa, synthetic construct
  REGION 1..13: note = Modified peptide: Ac-[Pen]-N-T-[W(7-Me)]-[Lys(Ac)]-[Hcy]-[Phe(4-OMe)]-[Nal]-[ THP]-[Lys(Ac)]-L-[3Pal]-[Sarc]-NH2
  SITE 1: note = Mod_Res - C-terminal is: ac
  SITE 1: note = misc_feature - Modified Amino Acid: Pen
  SITE 4: note = misc_feature - Modified Amino Acid: W7Me
  SITE 5: note = misc_feature - Modified Amino Acid: KAc
  SITE 6: note = misc_feature - Modified Amino Acid: Hcy
  SITE 7: note = misc_feature - Modified Amino Acid: F4OMe
  SITE 8: note = misc_feature - Modified Amino Acid: Nal
  SITE 9: note = misc_feature - Modified Amino Acid: THP
  SITE 10: note = misc_feature - Modified Amino Acid: KAc
  SITE 12: note = misc_feature - Modified Amino Acid: 3Pya
  SITE 13: note = misc_feature - Modified Amino Acid: MeGly
  SITE 13: note = Mod_Res - N-terminal is: am
  REGION 1..6: note = Disulfid - Cyclic bond: Pen to Hcy
XNTWKXXXXKLXG

SEQ ID NO: 56 - protein, 13 aa, synthetic construct
  REGION 1..13: note = Modified peptide: Ac-[Pen]-N-T-[W(7-Me)]-[Lys(Ac)]-[Hcy]-[Phe(4-OMe)]-[Nal]-[ THP]-[Lys(Ac)]-A-[3Pal]-[Sarc]-NH2
  SITE 1: note = Mod_Res - C-terminal is: ac
  SITE 1: note = misc_feature - Modified Amino Acid: Pen
  SITE 4: note = misc_feature - Modified Amino Acid: W7Me
  SITE 5: note = misc_feature - Modified Amino Acid: KAc
  SITE 6: note = misc_feature - Modified Amino Acid: Hcy
  SITE 7: note = misc_feature - Modified Amino Acid: F4OMe
  SITE 8: note = misc_feature - Modified Amino Acid: Nal
  SITE 9: note = misc_feature - Modified Amino Acid: THP
  SITE 10: note = misc_feature - Modified Amino Acid: KAc
  SITE 12: note = misc_feature - Modified Amino Acid: 3Pya
  SITE 13: note = misc_feature - Modified Amino Acid: MeGly
  SITE 13: note = Mod_Res - N-terminal is: am
  REGION 1..6: note = Disulfid - Cyclic bond: Pen to Hcy
XNTWKXXXXKAXG

SEQ ID NO: 57 - protein, 13 aa, synthetic construct
  REGION 1..13: note = Modified peptide: Ac-[Pen]-N-T-[W(7-Me)]-[Lys(Ac)]-[Pen]-[Phe(4-Ad)]-[Nal]-[T HP]-[Lys(Ac)]-L-[3Pal]-[Sarc]-NH2
  SITE 1: note = Mod_Res - C-terminal is: ac
  SITE 1: note = misc_feature - Modified Amino Acid: Pen
  SITE 4: note = misc_feature - Modified Amino Acid: W7Me
  SITE 5: note = misc_feature - Modified Amino Acid: KAc
  SITE 6: note = misc_feature - Modified Amino Acid: Pen
  SITE 7: note = misc_feature - Modified Amino Acid: F4Ad
  SITE 8: note = misc_feature - Modified Amino Acid: Nal
  SITE 9: note = misc_feature - Modified Amino Acid: THP
  SITE 10: note = misc_feature - Modified Amino Acid: KAc
  SITE 12: note = misc_feature - Modified Amino Acid: 3Pya
  SITE 13: note = misc_feature - Modified Amino Acid: MeGly
  SITE 13: note = Mod_Res - N-terminal is: am
  REGION 1..6: note = Disulfid - Cyclic bond: Pen to Pen
XNTWKXXXXKLXG

SEQ ID NO: 58 - protein, 13 aa, synthetic construct
  REGION 1..13: note = Modified peptide: Ac-[Pen]-L-T-[W(7-Me)]-[Lys(Ac)]-[Pen]-[Phe(4-OMe)]-[Nal]-[ aMeLeu]-L-N-[3Pal]-[Sarc]-NH2
  SITE 1: note = Mod_Res - C-terminal is: ac
  SITE 1: note = misc_feature - Modified Amino Acid: Pen
  SITE 4: note = misc_feature - Modified Amino Acid: W7Me
  SITE 5: note = misc_feature - Modified Amino Acid: KAc
  SITE 6: note = misc_feature - Modified Amino Acid: Pen
  SITE 7: note = misc_feature - Modified Amino Acid: F4OMe
  SITE 8: note = misc_feature - Modified Amino Acid: Nal
  SITE 9: note = misc_feature - Modified Amino Acid: aMeLeu
  SITE 12: note = misc_feature - Modified Amino Acid: 3Pya
  SITE 13: note = misc_feature - Modified Amino Acid: MeGly
  SITE 13: note = Mod_Res - N-terminal is: am
  REGION 1..6: note = Disulfid - Cyclic bond: Pen to Pen
XLTWKXXXLLNXG

SEQ ID NO: 59 - protein, 13 aa, synthetic construct
  REGION 1..13: note = Modified peptide: Ac-[Pen]-L-L-[W(7-Me)]-[Lys(Ac)]-[Pen]-[Phe(4-OMe)]-[Nal]-[ aMeLeu]-E-N-[3Pal]-[Sarc]-NH2
  SITE 1: note = Mod_Res - C-terminal is: ac
  SITE 1: note = misc_feature - Modified Amino Acid: Pen
  SITE 4: note = misc_feature - Modified Amino Acid: W7Me
  SITE 5: note = misc_feature - Modified Amino Acid: KAc
  SITE 6: note = misc_feature - Modified Amino Acid: Pen
  SITE 7: note = misc_feature - Modified Amino Acid: F4OMe
  SITE 8: note = misc_feature - Modified Amino Acid: Nal
  SITE 9: note = misc_feature - Modified Amino Acid: aMeLeu
  SITE 12: note = misc_feature - Modified Amino Acid: 3Pya
  SITE 13: note = misc_feature - Modified Amino Acid: MeGly
  SITE 13: note = Mod_Res - N-terminal is: am
  REGION 1..6: note = Disulfid - Cyclic bond: Pen to Pen
XLLWKXXXLENXG

SEQ ID NO: 60 - protein, 13 aa, synthetic construct
  REGION 1..13: note = Modified peptide: Ac-[Pen]-L-T-[W(7-Me)]-[Lys(Ac)]-[Pen]-[Phe(4-(2-aminoethox y))]-[Nal]-[THP]-L-L-[3Pal]-[Sarc]-NH2
  SITE 1: note = Mod_Res - C-terminal is: ac
  SITE 1: note = misc_feature - Modified Amino Acid: Pen
  SITE 4: note = misc_feature - Modified Amino Acid: W7Me
  SITE 5: note = misc_feature - Modified Amino Acid: KAc
  SITE 6: note = misc_feature - Modified Amino Acid: Pen
  SITE 7: note = misc_feature - Modified Amino Acid: AEF
  SITE 8: note = misc_feature - Modified Amino Acid: Nal
  SITE 9: note = misc_feature - Modified Amino Acid: THP
  SITE 12: note = misc_feature - Modified Amino Acid: 3Pya
  SITE 13: note = misc_feature - Modified Amino Acid: MeGly
  SITE 13: note = Mod_Res - N-terminal is: am
  REGION 1..6: note = Disulfid - Cyclic bond: Pen to Pen
XLTWKXXXXLLXG

SEQ ID NO: 61 - protein, 13 aa, synthetic construct
  REGION 1..13: note = Modified peptide: Ac-[Pen]-N-T-[W(7-Me)]-[Lys(Ac)]-[Pen]-[Phe(4-OMe)]-[Nal]-[ THP]-L-N-[3Pal]-[Sarc]-NH2
  SITE 1: note = Mod_Res - C-terminal is: ac
  SITE 1: note = misc_feature - Modified Amino Acid: Pen
  SITE 4: note = misc_feature - Modified Amino Acid: W7Me
  SITE 5: note = misc_feature - Modified Amino Acid: KAc
  SITE 6: note = misc_feature - Modified Amino Acid: Pen
  SITE 7: note = misc_feature - Modified Amino Acid: F4OMe
  SITE 8: note = misc_feature - Modified Amino Acid: Nal
  SITE 9: note = misc_feature - Modified Amino Acid: THP
  SITE 12: note = misc_feature - Modified Amino Acid: 3Pya
  SITE 13: note = misc_feature - Modified Amino Acid: MeGly
  SITE 13: note = Mod_Res - N-terminal is: am
  REGION 1..6: note = Disulfid - Cyclic bond: Pen to Pen
XNTWKXXXXLNXG

SEQ ID NO: 62 - protein, 13 aa, synthetic construct
  REGION 1..13: note = Modified peptide: Ac-[Pen]-N-T-[W(7-Me)]-[Lys(Ac)]-[Pen]-[Phe(4-OMe)]-[Nal]-[ aMeLeu]-E-L-[3Pal]-[Sarc]-NH2
  SITE 1: note = Mod_Res - C-terminal is: ac
  SITE 1: note = misc_feature - Modified Amino Acid: Pen
  SITE 4: note = misc_feature - Modified Amino Acid: W7Me
  SITE 5: note = misc_feature - Modified Amino Acid: KAc
  SITE 6: note = misc_feature - Modified Amino Acid: Pen
  SITE 7: note = misc_feature - Modified Amino Acid: F4OMe
  SITE 8: note = misc_feature - Modified Amino Acid: Nal
  SITE 9: note = misc_feature - Modified Amino Acid: aMeLeu
  SITE 12: note = misc_feature - Modified Amino Acid: 3Pya
  SITE 13: note = misc_feature - Modified Amino Acid: MeGly
  SITE 13: note = Mod_Res - N-terminal is: am
  REGION 1..6: note = Disulfid - Cyclic bond: Pen to Pen
XNTWKXXXLELXG

SEQ ID NO: 63 - protein, 13 aa, synthetic construct
  REGION 1..13: note = Modified peptide: Ac-[Pen]-N-T-[W(7-Me)]-[Lys(Ac)]-[Pen]-[Phe(4-OMe)]-[Nal]-[ aMeLeu]-L-N-[3Pal]-[Sarc]-NH2
  SITE 1: note = Mod_Res - C-terminal is: ac
  SITE 1: note = misc_feature - Modified Amino Acid: Pen
  SITE 4: note = misc_feature - Modified Amino Acid: W7Me
  SITE 5: note = misc_feature - Modified Amino Acid: KAc
  SITE 6: note = misc_feature - Modified Amino Acid: Pen
  SITE 7: note = misc_feature - Modified Amino Acid: F4OMe
  SITE 8: note = misc_feature - Modified Amino Acid: Nal
  SITE 9: note = misc_feature - Modified Amino Acid: aMeLeu
  SITE 12: note = misc_feature - Modified Amino Acid: 3Pya
  SITE 13: note = misc_feature - Modified Amino Acid: MeGly
  SITE 13: note = Mod_Res - N-terminal is: am
  REGION 1..6: note = Disulfid - Cyclic bond: Pen to Pen
XNTWKXXXLLNXG

SEQ ID NO: 64 - protein, 13 aa, synthetic construct
  REGION 1..13: note = Modified peptide: Ac-[Pen]-N-L-[W(7-Me)]-[Lys(Ac)]-[Pen]-[Phe(4-OMe)]-[Nal]-[ aMeLeu]-E-N-[3Pal]-[Sarc]-NH2
  SITE 1: note = Mod_Res - C-terminal is: ac
  SITE 1: note = misc_feature - Modified Amino Acid: Pen
  SITE 4: note = misc_feature - Modified Amino Acid: W7Me
  SITE 5: note = misc_feature - Modified Amino Acid: KAc
  SITE 6: note = misc_feature - Modified Amino Acid: Pen
  SITE 7: note = misc_feature - Modified Amino Acid: F4OMe
  SITE 8: note = misc_feature - Modified Amino Acid: Nal
  SITE 9: note = misc_feature - Modified Amino Acid: aMeLeu
  SITE 12: note = misc_feature - Modified Amino Acid: 3Pya
  SITE 13: note = misc_feature - Modified Amino Acid: MeGly
  SITE 13: note = Mod_Res - N-terminal is: am
  REGION 1..6: note = Disulfid - Cyclic bond: Pen to Pen
XNLWKXXXLENXG

SEQ ID NO: 65 - protein, 13 aa, synthetic construct
  REGION 1..13: note = Modified peptide: Ac-[Pen]-N-L-[W(7-Me)]-[Lys(Ac)]-[Pen]-[Phe(4-Ad)]-[Nal]-[a MeLeu]-L-N-[3Pal]-[Sarc]-NH2
  SITE 1: note = Mod_Res - C-terminal is: ac
  SITE 1: note = misc_feature - Modified Amino Acid: Pen
  SITE 4: note = misc_feature - Modified Amino Acid: W7Me
  SITE 5: note = misc_feature - Modified Amino Acid: KAc
  SITE 6: note = misc_feature - Modified Amino Acid: Pen
  SITE 7: note = misc_feature - Modified Amino Acid: F4Ad
  SITE 8: note = misc_feature - Modified Amino Acid: Nal
  SITE 9: note = misc_feature - Modified Amino Acid: aMeLeu
  SITE 12: note = misc_feature - Modified Amino Acid: 3Pya
  SITE 13: note = misc_feature - Modified Amino Acid: MeGly
  SITE 13: note = Mod_Res - N-terminal is: am
  REGION 1..6: note = Disulfid - Cyclic bond: Pen to Pen
XNLWKXXXLLNXG

SEQ ID NO: 66 - protein, 13 aa, synthetic construct
  REGION 1..13: note = Modified peptide: Ac-[Pen]-L-T-[W(7-Me)]-[Lys(Ac)]-[Pen]-[Phe(4-Ad)]-[Nal]-[a MeLeu]-L-N-[3Pal]-[Sarc]-NH2
  SITE 1: note = Mod_Res - C-terminal is: ac
  SITE 1: note = misc_feature - Modified Amino Acid: Pen
  SITE 4: note = misc_feature - Modified Amino Acid: W7Me
  SITE 5: note = misc_feature - Modified Amino Acid: KAc
  SITE 6: note = misc_feature - Modified Amino Acid: Pen
  SITE 7: note = misc_feature - Modified Amino Acid: F4Ad
  SITE 8: note = misc_feature - Modified Amino Acid: Nal
  SITE 9: note = misc_feature - Modified Amino Acid: aMeLeu
  SITE 12: note = misc_feature - Modified Amino Acid: 3Pya
  SITE 13: note = misc_feature - Modified Amino Acid: MeGly
  SITE 13: note = Mod_Res - N-terminal is: am
  REGION 1..6: note = Disulfid - Cyclic bond: Pen to Pen
XLTWKXXXLLNXG

SEQ ID NO: 67 - protein, 13 aa, synthetic construct
  REGION 1..13: note = Modified peptide: Ac-[Pen]-L-L-[W(7-Me)]-[Lys(Ac)]-[Pen]-[Phe(4-Ad)]-[Nal]-[a MeLeu]-E-N-[3Pal]-[Sarc]-NH2
  SITE 1: note = Mod_Res - C-terminal is: ac
  SITE 1: note = misc_feature - Modified Amino Acid: Pen
  SITE 4: note = misc_feature - Modified Amino Acid: W7Me
  SITE 5: note = misc_feature - Modified Amino Acid: KAc
  SITE 6: note = misc_feature - Modified Amino Acid: Pen
  SITE 7: note = misc_feature - Modified Amino Acid: F4Ad
  SITE 8: note = misc_feature - Modified Amino Acid: Nal
  SITE 9: note = misc_feature - Modified Amino Acid: aMeLeu
  SITE 12: note = misc_feature - Modified Amino Acid: 3Pya
  SITE 13: note = misc_feature - Modified Amino Acid: MeGly
  SITE 13: note = Mod_Res - N-terminal is: am
  REGION 1..6: note = Disulfid - Cyclic bond: Pen to Pen
XLLWKXXXLENXG

SEQ ID NO: 68 - protein, 13 aa, synthetic construct
  REGION 1..13: note = Modified peptide: Ac-[Pen]-N-T-[W(7-Me)]-[Lys(Ac)]-[Pen]-[Phe(4-Ad)]-[Nal]-[a MeLeu]-E-L-[3Pal]-[Sarc]-NH2
  SITE 1: note = Mod_Res - C-terminal is: ac
  SITE 1: note = misc_feature - Modified Amino Acid: Pen
  SITE 4: note = misc_feature - Modified Amino Acid: W7Me
  SITE 5: note = misc_feature - Modified Amino Acid: KAc
  SITE 6: note = misc_feature - Modified Amino Acid: Pen
  SITE 7: note = misc_feature - Modified Amino Acid: F4Ad
  SITE 8: note = misc_feature - Modified Amino Acid: Nal
  SITE 9: note = misc_feature - Modified Amino Acid: aMeLeu
  SITE 12: note = misc_feature - Modified Amino Acid: 3Pya
  SITE 13: note = misc_feature - Modified Amino Acid: MeGly
  SITE 13: note = Mod_Res - N-terminal is: am
  REGION 1..6: note = Disulfid - Cyclic bond: Pen to Pen
XNTWKXXXLELXG

SEQ ID NO: 69 - protein, 13 aa, synthetic construct
  REGION 1..13: note = Modified peptide: Ac-[Pen]-N-T-[W(7-Me)]-[Lys(Ac)]-[Pen]-[Phe(4-Ad)]-[Nal]-[a MeLeu]-L-N-[3Pal]-[Sarc]-NH2
  SITE 1: note = Mod_Res - C-terminal is: ac
  SITE 1: note = misc_feature - Modified Amino Acid: Pen
  SITE 4: note = misc_feature - Modified Amino Acid: W7Me
  SITE 5: note = misc_feature - Modified Amino Acid: KAc
  SITE 6: note = misc_feature - Modified Amino Acid: Pen
  SITE 7: note = misc_feature - Modified Amino Acid: F4Ad
  SITE 8: note = misc_feature - Modified Amino Acid: Nal
  SITE 9: note = misc_feature - Modified Amino Acid: aMeLeu
  SITE 12: note = misc_feature - Modified Amino Acid: 3Pya
  SITE 13: note = misc_feature - Modified Amino Acid: MeGly
  SITE 13: note = Mod_Res - N-terminal is: am
  REGION 1..6: note = Disulfid - Cyclic bond: Pen to Pen
XNTWKXXXLLNXG

SEQ ID NO: 70 - protein, 13 aa, synthetic construct
  REGION 1..13: note = Modified peptide: Ac-[Pen]-N-L-[W(7-Me)]-[Lys(Ac)]-[Pen]-[Phe(4-Ad)]-[Nal]-[a MeLeu]-E-N-[3Pal]-[Sarc]-NH2
  SITE 1: note = Mod_Res - C-terminal is: ac
  SITE 1: note = misc_feature - Modified Amino Acid: Pen
  SITE 4: note = misc_feature - Modified Amino Acid: W7Me
  SITE 5: note = misc_feature - Modified Amino Acid: KAc
  SITE 6: note = misc_feature - Modified Amino Acid: Pen
  SITE 7: note = misc_feature - Modified Amino Acid: F4Ad
  SITE 8: note = misc_feature - Modified Amino Acid: Nal
  SITE 9: note = misc_feature - Modified Amino Acid: aMeLeu
  SITE 12: note = misc_feature - Modified Amino Acid: 3Pya
  SITE 13: note = misc_feature - Modified Amino Acid: MeGly
  SITE 13: note = Mod_Res - N-terminal is: am
  REGION 1..6: note = Disulfid - Cyclic bond: Pen to Pen
XNLWKXXXLENXG

SEQ ID NO: 71 - protein, 13 aa, synthetic construct
  REGION 1..13: note = Modified peptide: Ac-[Pen]-L-T-[W(7-Me)]-[Lys(IsoButyl_Ac)]-[Pen]-[Phe(4-(2-a minoethoxy))]-[Nal]-[THP]-L-N-[3Pal]-[Sarc]-NH2
  SITE 1: note = Mod_Res - C-terminal is: ac
  SITE 1: note = misc_feature - Modified Amino Acid: Pen
  SITE 4: note = misc_feature - Modified Amino Acid: W7Me
  SITE 5: note = misc_feature - Modified Amino Acid: K(IsoButyl_Ac)
  SITE 6: note = misc_feature - Modified Amino Acid: Pen
  SITE 7: note = misc_feature - Modified Amino Acid: AEF
  SITE 8: note = misc_feature - Modified Amino Acid: Nal
  SITE 9: note = misc_feature - Modified Amino Acid: THP
  SITE 12: note = misc_feature - Modified Amino Acid: 3Pya
  SITE 13: note = misc_feature - Modified Amino Acid: MeGly
  SITE 13: note = Mod_Res - N-terminal is: am
  REGION 1..6: note = Disulfid - Cyclic bond: Pen to Pen
XLTWXXXXXLNXG

SEQ ID NO: 72 - protein, 13 aa, synthetic construct
  REGION 1..13: note = Modified peptide: Ac-[Pen]-L-T-[W(7-Me)]-[Lys(Butyl_Ac)]-[Pen]-[Phe(4-(2-amin oethoxy))]-[Nal]-[THP]-L-N-[3Pal]-[Sarc]-NH2
  SITE 1: note = Mod_Res - C-terminal is: ac
  SITE 1: note = misc_feature - Modified Amino Acid: Pen
  SITE 4: note = misc_feature - Modified Amino Acid: W7Me
  SITE 5: note = misc_feature - Modified Amino Acid: K(Butyl_Ac)
  SITE 6: note = misc_feature - Modified Amino Acid: Pen
  SITE 7: note = misc_feature - Modified Amino Acid: AEF
  SITE 8: note = misc_feature - Modified Amino Acid: Nal
  SITE 9: note = misc_feature - Modified Amino Acid: THP
  SITE 12: note = misc_feature - Modified Amino Acid: 3Pya
  SITE 13: note = misc_feature - Modified Amino Acid: MeGly
  SITE 13: note = Mod_Res - N-terminal is: am
  REGION 1..6: note = Disulfid - Cyclic bond: Pen to Pen
XLTWXXXXXLNXG

SEQ ID NO: 73 - protein, 13 aa, synthetic construct
  REGION 1..13: note = Modified peptide: Ac-[Pen]-L-T-[W(7-Me)]-[Lys(Benzyl_Ac)]-[Pen]-[Phe(4-(2-ami noethoxy))]-[Nal]-[THP]-L-N-[3Pal]-[Sarc]-NH2
  SITE 1: note = Mod_Res - C-terminal is: ac
  SITE 1: note = misc_feature - Modified Amino Acid: Pen
  SITE 4: note = misc_feature - Modified Amino Acid: W7Me
  SITE 5: note = misc_feature - Modified Amino Acid: K(Benzyl_Ac)
  SITE 6: note = misc_feature - Modified Amino Acid: Pen
  SITE 7: note = misc_feature - Modified Amino Acid: AEF
  SITE 8: note = misc_feature - Modified Amino Acid: Nal
  SITE 9: note = misc_feature - Modified Amino Acid: THP
  SITE 12: note = misc_feature - Modified Amino Acid: 3Pya
  SITE 13: note = misc_feature - Modified Amino Acid: MeGly
  SITE 13: note = Mod_Res - N-terminal is: am
  REGION 1..6: note = Disulfid - Cyclic bond: Pen to Pen
XLTWXXXXXLNXG

SEQ ID NO: 74 - protein, 13 aa, synthetic construct
  REGION 1..13: note = Modified peptide: Ac-[Pen]-N-[MeThr]-[W(7-Me)]-[Lys(Ac)]-[Pen]-F-[Nal]-[THP]- [Lys(Ac)]-N-[3Pal]-[Sarc]-NH2
  SITE 1: note = Mod_Res - C-terminal is: ac
  SITE 1: note = misc_feature - Modified Amino Acid: Pen
  SITE 3: note = misc_feature - Modified Amino Acid: MeThr
  SITE 4: note = misc_feature - Modified Amino Acid: W7Me
  SITE 5: note = misc_feature - Modified Amino Acid: KAc
  SITE 6: note = misc_feature - Modified Amino Acid: Pen
  SITE 8: note = misc_feature - Modified Amino Acid: Nal
  SITE 9: note = misc_feature - Modified Amino Acid: THP
  SITE 10: note = misc_feature - Modified Amino Acid: KAc
  SITE 12: note = misc_feature - Modified Amino Acid: 3Pya
  SITE 13: note = misc_feature - Modified Amino Acid: MeGly
  SITE 13: note = Mod_Res - N-terminal is: am
  REGION 1..6: note = Disulfid - Cyclic bond: Pen to Pen
XNTWKXFXXKNXG

SEQ ID NO: 75 - protein, 13 aa, synthetic construct
  REGION 1..13: note = Modified peptide: Ac-[Pen]-N-T-[W(7-Me)]-[N-MeGln]-[Pen]-F-[Nal]-[THP]-[Lys(A c)]-N-[3Pal]-[Sarc]-NH2
  SITE 1: note = Mod_Res - C-terminal is: ac
  SITE 1: note = misc_feature - Modified Amino Acid: Pen
  SITE 4: note = misc_feature - Modified Amino Acid: W7Me
  SITE 5: note = misc_feature - Modified Amino Acid: N-MeGln
  SITE 6: note = misc_feature - Modified Amino Acid: Pen
  SITE 8: note = misc_feature - Modified Amino Acid: Nal
  SITE 9: note = misc_feature - Modified Amino Acid: THP
  SITE 10: note = misc_feature - Modified Amino Acid: KAc
  SITE 12: note = misc_feature - Modified Amino Acid: 3Pya
  SITE 13: note = misc_feature - Modified Amino Acid: MeGly
  SITE 13: note = Mod_Res - N-terminal is: am
  REGION 1..6: note = Disulfid - Cyclic bond: Pen to Pen
XNTWXXFXXKNXG

SEQ ID NO: 76 - protein, 13 aa, synthetic construct
  REGION 1..13: note = Modified peptide: Ac-[Pen]-N-T-[W(7-Me)]-[Lys(Ac)]-[Pen]-F-[Nal]-[MeLys]-[Lys (Ac)]-N-[3Pal]-[Sarc]-NH2
  SITE 1: note = Mod_Res - C-terminal is: ac
  SITE 1: note = misc_feature - Modified Amino Acid: Pen
  SITE 4: note = misc_feature - Modified Amino Acid: W7Me
  SITE 5: note = misc_feature - Modified Amino Acid: KAc
  SITE 6: note = misc_feature - Modified Amino Acid: Pen
  SITE 8: note = misc_feature - Modified Amino Acid: Nal
  SITE 9: note = misc_feature - Modified Amino Acid: MeK
  SITE 10: note = misc_feature - Modified Amino Acid: KAc
  SITE 12: note = misc_feature - Modified Amino Acid: 3Pya
  SITE 13: note = misc_feature - Modified Amino Acid: MeGly
  SITE 13: note = Mod_Res - N-terminal is: am
  REGION 1..6: note = Disulfid - Cyclic bond: Pen to Pen
XNTWKXFXKKNXG

SEQ ID NO: 77 - protein, 13 aa, synthetic construct
  REGION 1..13: note = Modified peptide: Ac-[Pen]-N-T-[W(7-Me)]-[Lys(Ac)]-[Pen]-F-[Nal]-[THP]-[Lys(A c)]-[N-MeAsn]-[3Pal]-[Sarc]-NH2
  SITE 1: note = Mod_Res - C-terminal is: ac
  SITE 1: note = misc_feature - Modified Amino Acid: Pen
  SITE 4: note = misc_feature - Modified Amino Acid: W7Me
  SITE 5: note = misc_feature - Modified Amino Acid: KAc
  SITE 6: note = misc_feature - Modified Amino Acid: Pen
  SITE 8: note = misc_feature - Modified Amino Acid: Nal
  SITE 9: note = misc_feature - Modified Amino Acid: THP
  SITE 10: note = misc_feature - Modified Amino Acid: KAc
  SITE 11: note = misc_feature - Modified Amino Acid: N-MeAsn
  SITE 12: note = misc_feature - Modified Amino Acid: 3Pya
  SITE 13: note = misc_feature - Modified Amino Acid: MeGly
  SITE 13: note = Mod_Res - N-terminal is: am
  REGION 1..6: note = Disulfid - Cyclic bond: Pen to Pen
XNTWKXFXXKNXG

SEQ ID NO: 78 - protein, 13 aa, synthetic construct
  REGION 1..13: note = Modified peptide: Ac-[Pen]-N-T-[W(7-Me)]-[Lys(Ac)]-[Pen]-F-[Nal]-[THP]-[Lys(A c)]-[MeLeu]-[3Pal]-[Sarc]-NH2
  SITE 1: note = Mod_Res - C-terminal is: ac
  SITE 1: note = misc_feature - Modified Amino Acid: Pen
  SITE 4: note = misc_feature - Modified Amino Acid: W7Me
  SITE 5: note = misc_feature - Modified Amino Acid: KAc
  SITE 6: note = misc_feature - Modified Amino Acid: Pen
  SITE 8: note = misc_feature - Modified Amino Acid: Nal
  SITE 9: note = misc_feature - Modified Amino Acid: THP
  SITE 10: note = misc_feature - Modified Amino Acid: KAc
  SITE 11: note = misc_feature - Modified Amino Acid: MeLeu
  SITE 12: note = misc_feature - Modified Amino Acid: 3Pya
  SITE 13: note = misc_feature - Modified Amino Acid: MeGly
  SITE 13: note = Mod_Res - N-terminal is: am
  REGION 1..6: note = Disulfid - Cyclic bond: Pen to Pen
XNTWKXFXXKLXG

SEQ ID NO: 79 - protein, 13 aa, synthetic construct
  REGION 1..13: note = Modified peptide: Ac-[Pen]-L-T-[W(7-Me)]-[Lys(Ac)]-[Pen]-F-[Nal]-[Spiral_Pip] -[Lys(Ac)]-L-[3Pal]-[Sarc]-NH2
  SITE 1: note = Mod_Res - C-terminal is: ac
  SITE 1: note = misc_feature - Modified Amino Acid: Pen
  SITE 4: note = misc_feature - Modified Amino Acid: W7Me
  SITE 5: note = misc_feature - Modified Amino Acid: KAc
  SITE 6: note = misc_feature - Modified Amino Acid: Pen
  SITE 8: note = misc_feature - Modified Amino Acid: Nal
  SITE 9: note = misc_feature - Modified Amino Acid: Spiral_Pip
  SITE 10: note = misc_feature - Modified Amino Acid: KAc
  SITE 12: note = misc_feature - Modified Amino Acid: 3Pya
  SITE 13: note = misc_feature - Modified Amino Acid: MeGly
  SITE 13: note = Mod_Res - N-terminal is: am
  REGION 1..6: note = Disulfid - Cyclic bond: Pen to Pen
XLTWKXFXXKLXG

SEQ ID NO: 80 - protein, 13 aa, synthetic construct
  REGION 1..13: note = Modified peptide: Ac-[Pen]-N-T-[W(7-Me)]-[Lys(Ac)]-[Pen]-F-[Nal]-[Spiral_Pip] -L-L-[3Pal]-[Sarc]-NH2
  SITE 1: note = Mod_Res - C-terminal is: ac
  SITE 1: note = misc_feature - Modified Amino Acid: Pen
  SITE 4: note = misc_feature - Modified Amino Acid: W7Me
  SITE 5: note = misc_feature - Modified Amino Acid: KAc
  SITE 6: note = misc_feature - Modified Amino Acid: Pen
  SITE 8: note = misc_feature - Modified Amino Acid: Nal
  SITE 9: note = misc_feature - Modified Amino Acid: Spiral_Pip
  SITE 12: note = misc_feature - Modified Amino Acid: 3Pya
  SITE 13: note = misc_feature - Modified Amino Acid: MeGly
  SITE 13: note = Mod_Res - N-terminal is: am
  REGION 1..6: note = Disulfid - Cyclic bond: Pen to Pen
XNTWKXFXXLLXG

SEQ ID NO: 81 - protein, 13 aa, synthetic construct
  REGION 1..13: note = Modified peptide: Ac-[Pen]-N-T-[W(7-Me)]-[Lys(Ac)]-[Pen]-F-[Nal]-[Spiral_Pip] -[Lys(Ac)]-L-[3Pal]-[Sarc]-NH2
  SITE 1: note = Mod_Res - C-terminal is: ac
  SITE 1: note = misc_feature - Modified Amino Acid: Pen
  SITE 4: note = misc_feature - Modified Amino Acid: W7Me
  SITE 5: note = misc_feature - Modified Amino Acid: KAc
  SITE 6: note = misc_feature - Modified Amino Acid: Pen
  SITE 8: note = misc_feature - Modified Amino Acid: Nal
  SITE 9: note = misc_feature - Modified Amino Acid: Spiral_Pip
  SITE 10: note = misc_feature - Modified Amino Acid: KAc
  SITE 12: note = misc_feature - Modified Amino Acid: 3Pya
  SITE 13: note = misc_feature - Modified Amino Acid: MeGly
  SITE 13: note = Mod_Res - N-terminal is: am
  REGION 1..6: note = Disulfid - Cyclic bond: Pen to Pen
XNTWKXFXXKLXG

SEQ ID NO: 82 - protein, 13 aa, synthetic construct
  REGION 1..13: note = Modified peptide: Ac-[Pen]-L-T-[W(7-Me)]-[Lys(Ac)]-[Pen]-[Phe(4-OMe)]-[Nal]-[ THP]-L-N-[3Pal]-[Sarc]-NH2
  SITE 1: note = Mod_Res - C-terminal is: ac
  SITE 1: note = misc_feature - Modified Amino Acid: Pen
  SITE 4: note = misc_feature - Modified Amino Acid: W7Me
  SITE 5: note = misc_feature - Modified Amino Acid: KAc
  SITE 6: note = misc_feature - Modified Amino Acid: Pen
  SITE 7: note = misc_feature - Modified Amino Acid: F4OMe
  SITE 8: note = misc_feature - Modified Amino Acid: Nal
  SITE 9: note = misc_feature - Modified Amino Acid: THP
  SITE 12: note = misc_feature - Modified Amino Acid: 3Pya
  SITE 13: note = misc_feature - Modified Amino Acid: MeGly
  SITE 13: note = Mod_Res - N-terminal is: am
  REGION 1..6: note = Disulfid - Cyclic bond: Pen to Pen
XLTWKXXXXLNXG

SEQ ID NO: 83 - protein, 13 aa, synthetic construct
  REGION 1..13: note = Modified peptide: Ac-[Pen]-N-T-[W(7-Me)]-[Lys(Ac)]-[Pen]-[Phe(4-(2-aminoethox y))]-[Nal]-[THP]-L-L-[3Pal]-[Sarc]-NH2
  SITE 1: note = Mod_Res - C-terminal is: ac
  SITE 1: note = misc_feature - Modified Amino Acid: Pen
  SITE 4: note = misc_feature - Modified Amino Acid: W7Me
  SITE 5: note = misc_feature - Modified Amino Acid: KAc
  SITE 6: note = misc_feature - Modified Amino Acid: Pen
  SITE 7: note = misc_feature - Modified Amino Acid: AEF
  SITE 8: note = misc_feature - Modified Amino Acid: Nal
  SITE 9: note = misc_feature - Modified Amino Acid: THP
  SITE 12: note = misc_feature - Modified Amino Acid: 3Pya
  SITE 13: note = misc_feature - Modified Amino Acid: MeGly
  SITE 13: note = Mod_Res - N-terminal is: am
  REGION 1..6: note = Disulfid - Cyclic bond: Pen to Pen
XNTWKXXXXLLXG

SEQ ID NO: 84 - protein, 13 aa, synthetic construct
  REGION 1..13: note = Modified peptide: Ac-[Pen]-N-L-[W(7-Me)]-[Lys(Ac)]-[Pen]-[Phe(4-(2-aminoethox y))]-[Nal]-[THP]-L-N-[3Pal]-[Sarc]-NH2
  SITE 1: note = Mod_Res - C-terminal is: ac
  SITE 1: note = misc_feature - Modified Amino Acid: Pen
  SITE 4: note = misc_feature - Modified Amino Acid: W7Me
  SITE 5: note = misc_feature - Modified Amino Acid: KAc
  SITE 6: note = misc_feature - Modified Amino Acid: Pen
  SITE 7: note = misc_feature - Modified Amino Acid: AEF
  SITE 8: note = misc_feature - Modified Amino Acid: Nal
  SITE 9: note = misc_feature - Modified Amino Acid: THP
  SITE 12: note = misc_feature - Modified Amino Acid: 3Pya
  SITE 13: note = misc_feature - Modified Amino Acid: MeGly
  SITE 13: note = Mod_Res - N-terminal is: am
  REGION 1..6: note = Disulfid - Cyclic bond: Pen to Pen
XNLWKXXXXLNXG

SEQ ID NO: 85 - protein, 13 aa, synthetic construct
  REGION 1..13: note = Modified peptide: Ac-[Pen]-L-T-[W(7-Me)]-[Lys(Ac)]-[Pen]-[Phe(4-(2-aminoethox y))]-[Nal]-[THP]-E-L-[3Pal]-[Sarc]-NH2
  SITE 1: note = Mod_Res - C-terminal is: ac
  SITE 1: note = misc_feature - Modified Amino Acid: Pen
  SITE 4: note = misc_feature - Modified Amino Acid: W7Me
  SITE 5: note = misc_feature - Modified Amino Acid: KAc
  SITE 6: note = misc_feature - Modified Amino Acid: Pen
  SITE 7: note = misc_feature - Modified Amino Acid: AEF
  SITE 8: note = misc_feature - Modified Amino Acid: Nal
  SITE 9: note = misc_feature - Modified Amino Acid: THP
  SITE 12: note = misc_feature - Modified Amino Acid: 3Pya
  SITE 13: note = misc_feature - Modified Amino Acid: MeGly
  SITE 13: note = Mod_Res - N-terminal is: am
  REGION 1..6: note = Disulfid - Cyclic bond: Pen to Pen
XLTWKXXXXELXG

SEQ ID NO: 86 - protein, 13 aa, synthetic construct
  REGION 1..13: note = Modified peptide: Ac-[Pen]-L-T-[W(7-Me)]-[Lys(Ac)]-[Pen]-[Phe(4-(2-aminoethox y))]-[Nal]-[THP]-L-N-[3Pal]-[Sarc]-NH2
  SITE 1: note = Mod_Res - C-terminal is: ac
  SITE 1: note = misc_feature - Modified Amino Acid: Pen
  SITE 4: note = misc_feature - Modified Amino Acid: W7Me
  SITE 5: note = misc_feature - Modified Amino Acid: KAc
  SITE 6: note = misc_feature - Modified Amino Acid: Pen
  SITE 7: note = misc_feature - Modified Amino Acid: AEF
  SITE 8: note = misc_feature - Modified Amino Acid: Nal
  SITE 9: note = misc_feature - Modified Amino Acid: THP
  SITE 12: note = misc_feature - Modified Amino Acid: 3Pya
  SITE 13: note = misc_feature - Modified Amino Acid: MeGly
  SITE 13: note = Mod_Res - N-terminal is: am
  REGION 1..6: note = Disulfid - Cyclic bond: Pen to Pen
XLTWKXXXXLNXG

SEQ ID NO: 87 - protein, 13 aa, synthetic construct
  REGION 1..13: note = Modified peptide: Ac-[Pen]-L-L-[W(7-Me)]-[Lys(Ac)]-[Pen]-[Phe(4-(2-aminoethox y))]-[Nal]-[THP]-E-N-[3Pal]-[Sarc]-NH2
  SITE 1: note = Mod_Res - C-terminal is: ac
  SITE 1: note = misc_feature - Modified Amino Acid: Pen
  SITE 4: note = misc_feature - Modified Amino Acid: W7Me
  SITE 5: note = misc_feature - Modified Amino Acid: KAc
  SITE 6: note = misc_feature - Modified Amino Acid: Pen
  SITE 7: note = misc_feature - Modified Amino Acid: AEF
  SITE 8: note = misc_feature - Modified Amino Acid: Nal
  SITE 9: note = misc_feature - Modified Amino Acid: THP
  SITE 12: note = misc_feature - Modified Amino Acid: 3Pya
  SITE 13: note = misc_feature - Modified Amino Acid: MeGly
  SITE 13: note = Mod_Res - N-terminal is: am
  REGION 1..6: note = Disulfid - Cyclic bond: Pen to Pen
XLLWKXXXXENXG

SEQ ID NO: 88 - protein, 13 aa, synthetic construct
  REGION 1..13: note = Modified peptide: Ac-[Pen]-N-T-[W(7-Me)]-[Lys(Ac)]-[Pen]-[Phe(4-(2-aminoethox y))]-[Nal]-[THP]-E-L-[3Pal]-[Sarc]-NH2
  SITE 1: note = Mod_Res - C-terminal is: ac
  SITE 1: note = misc_feature - Modified Amino Acid: Pen
  SITE 4: note = misc_feature - Modified Amino Acid: W7Me
  SITE 5: note = misc_feature - Modified Amino Acid: KAc
  SITE 6: note = misc_feature - Modified Amino Acid: Pen
  SITE 7: note = misc_feature - Modified Amino Acid: AEF
  SITE 8: note = misc_feature - Modified Amino Acid: Nal
  SITE 9: note = misc_feature - Modified Amino Acid: THP
  SITE 12: note = misc_feature - Modified Amino Acid: 3Pya
  SITE 13: note = misc_feature - Modified Amino Acid: MeGly
  SITE 13: note = Mod_Res - N-terminal is: am
  REGION 1..6: note = Disulfid - Cyclic bond: Pen to Pen
XNTWKXXXXELXG

SEQ ID NO: 89 - protein, 13 aa, synthetic construct
  REGION 1..13: note = Modified peptide: Ac-[Pen]-N-T-[W(7-Me)]-[Lys(Ac)]-[Pen]-[Phe(4-(2-aminoethox y))]-[Nal]-[THP]-L-N-[3Pal]-[Sarc]-NH2
  SITE 1: note = Mod_Res - C-terminal is: ac
  SITE 1: note = misc_feature - Modified Amino Acid: Pen
  SITE 4: note = misc_feature - Modified Amino Acid: W7Me
  SITE 5: note = misc_feature - Modified Amino Acid: KAc
  SITE 6: note = misc_feature - Modified Amino Acid: Pen
  SITE 7: note = misc_feature - Modified Amino Acid: AEF
  SITE 8: note = misc_feature - Modified Amino Acid: Nal
  SITE 9: note = misc_feature - Modified Amino Acid: THP
  SITE 12: note = misc_feature - Modified Amino Acid: 3Pya
  SITE 13: note = misc_feature - Modified Amino Acid: MeGly
  SITE 13: note = Mod_Res - N-terminal is: am
  REGION 1..6: note = Disulfid - Cyclic bond: Pen to Pen
XNTWKXXXXLNXG

SEQ ID NO: 90 - protein, 13 aa, synthetic construct
  REGION 1..13: note = Modified peptide: Ac-[Pen]-N-L-[W(7-Me)]-[Lys(Ac)]-[Pen]-[Phe(4-(2-aminoethox y))]-[Nal]-[THP]-E-N-[3Pal]-[Sarc]-NH2
  SITE 1: note = Mod_Res - C-terminal is: ac
  SITE 1: note = misc_feature - Modified Amino Acid: Pen
  SITE 4: note = misc_feature - Modified Amino Acid: W7Me
  SITE 5: note = misc_feature - Modified Amino Acid: KAc
  SITE 6: note = misc_feature - Modified Amino Acid: Pen
  SITE 7: note = misc_feature - Modified Amino Acid: AEF
  SITE 8: note = misc_feature - Modified Amino Acid: Nal
  SITE 9: note = misc_feature - Modified Amino Acid: THP
  SITE 12: note = misc_feature - Modified Amino Acid: 3Pya
  SITE 13: note = misc_feature - Modified Amino Acid: MeGly
  SITE 13: note = Mod_Res - N-terminal is: am
  REGION 1..6: note = Disulfid - Cyclic bond: Pen to Pen
XNLWKXXXXENXG

SEQ ID NO: 91 - protein, 13 aa, synthetic construct
  REGION 1..13: note = Modified peptide: Ac-[Pen]-N-T-[W(7-Me)]-[Lys(Ac)]-[Pen]-[Nal]-[Nal]-[aMeLys] -E-L-[3Pal]-[Sarc]-NH2
  SITE 1: note = Mod_Res - C-terminal is: ac
  SITE 1: note = misc_feature - Modified Amino Acid: Pen
  SITE 4: note = misc_feature - Modified Amino Acid: W7Me
  SITE 5: note = misc_feature - Modified Amino Acid: KAc
  SITE 6: note = misc_feature - Modified Amino Acid: Pen
  SITE 7: note = misc_feature - Modified Amino Acid: Nal
  SITE 8: note = misc_feature - Modified Amino Acid: Nal
  SITE 9: note = misc_feature - Modified Amino Acid: aMeK
  SITE 12: note = misc_feature - Modified Amino Acid: 3Pya
  SITE 13: note = misc_feature - Modified Amino Acid: MeGly
  SITE 13: note = Mod_Res - N-terminal is: am
  REGION 1..6: note = Disulfid - Cyclic bond: Pen to Pen
XNTWKXXXKELXG

SEQ ID NO: 92 - protein, 13 aa, synthetic construct
  REGION 1..13: note = Modified peptide: Ac-[Pen]-N-T-[W(7-Me)]-[Lys(Ac)]-[Pen]-[Nal]-[Nal]-[THP]-E- L-[3Pal]-[Sarc]-NH2
  SITE 1: note = Mod_Res - C-terminal is: ac
  SITE 1: note = misc_feature - Modified Amino Acid: Pen
  SITE 4: note = misc_feature - Modified Amino Acid: W7Me
  SITE 5: note = misc_feature - Modified Amino Acid: KAc
  SITE 6: note = misc_feature - Modified Amino Acid: Pen
  SITE 7: note = misc_feature - Modified Amino Acid: Nal
  SITE 8: note = misc_feature - Modified Amino Acid: Nal
  SITE 9: note = misc_feature - Modified Amino Acid: THP
  SITE 12: note = misc_feature - Modified Amino Acid: 3Pya
  SITE 13: note = misc_feature - Modified Amino Acid: MeGly
  SITE 13: note = Mod_Res - N-terminal is: am
  REGION 1..6: note = Disulfid - Cyclic bond: Pen to Pen
XNTWKXXXXELXG

SEQ ID NO: 93 - protein, 13 aa, synthetic construct
  REGION 1..13: note = Modified peptide: Ac-[Pen]-N-T-[W(7-Me)]-[Lys(Ac)]-[Pen]-[Nal]-[Nal]-[aMeLys] -[Lys(Ac)]-L-[3Pal]-[Sarc]-NH2
  SITE 1: note = Mod_Res - C-terminal is: ac
  SITE 1: note = misc_feature - Modified Amino Acid: Pen
  SITE 4: note = misc_feature - Modified Amino Acid: W7Me
  SITE 5: note = misc_feature - Modified Amino Acid: KAc
  SITE 6: note = misc_feature - Modified Amino Acid: Pen
  SITE 7: note = misc_feature - Modified Amino Acid: Nal
  SITE 8: note = misc_feature - Modified Amino Acid: Nal
  SITE 9: note = misc_feature - Modified Amino Acid: aMeK
  SITE 10: note = misc_feature - Modified Amino Acid: KAc
  SITE 12: note = misc_feature - Modified Amino Acid: 3Pya
  SITE 13: note = misc_feature - Modified Amino Acid: MeGly
  SITE 13: note = Mod_Res - N-terminal is: am
  REGION 1..6: note = Disulfid - Cyclic bond: Pen to Pen
XNTWKXXXKKLXG

SEQ ID NO: 94 - protein, 13 aa, synthetic construct
  REGION 1..13: note = Modified peptide: Ac-[Pen]-N-T-[W(7-Me)]-[Lys(Ac)]-[Pen]-[Nal]-[Nal]-[THP]-[L ys(Ac)]-L-[3Pal]-[Sarc]-NH2
  SITE 1: note = Mod_Res - C-terminal is: ac
  SITE 1: note = misc_feature - Modified Amino Acid: Pen
  SITE 4: note = misc_feature - Modified Amino Acid: W7Me
  SITE 5: note = misc_feature - Modified Amino Acid: KAc
  SITE 6: note = misc_feature - Modified Amino Acid: Pen
  SITE 7: note = misc_feature - Modified Amino Acid: Nal
  SITE 8: note = misc_feature - Modified Amino Acid: Nal
  SITE 9: note = misc_feature - Modified Amino Acid: THP
  SITE 10: note = misc_feature - Modified Amino Acid: KAc
  SITE 12: note = misc_feature - Modified Amino Acid: 3Pya
  SITE 13: note = misc_feature - Modified Amino Acid: MeGly
  SITE 13: note = Mod_Res - N-terminal is: am
  REGION 1..6: note = Disulfid - Cyclic bond: Pen to Pen
XNTWKXXXXKLXG

SEQ ID NO: 95 - protein, 13 aa, synthetic construct
  REGION 1..13: note = Modified peptide: Ac-[Pen]-N-T-[W(7-Me)]-[Lys(Ac)]-[Pen]-F-[Nal]-[aMeLys]-L-L -[3Pal]-[Sarc]-NH2
  SITE 1: note = Mod_Res - C-terminal is: ac
  SITE 1: note = misc_feature - Modified Amino Acid: Pen
  SITE 4: note = misc_feature - Modified Amino Acid: W7Me
  SITE 5: note = misc_feature - Modified Amino Acid: KAc
  SITE 6: note = misc_feature - Modified Amino Acid: Pen
  SITE 8: note = misc_feature - Modified Amino Acid: Nal
  SITE 9: note = misc_feature - Modified Amino Acid: aMeK
  SITE 12: note = misc_feature - Modified Amino Acid: 3Pya
  SITE 13: note = misc_feature - Modified Amino Acid: MeGly
  SITE 13: note = Mod_Res - N-terminal is: am
  REGION 1..6: note = Disulfid - Cyclic bond: Pen to Pen
XNTWKXFXKLLXG

SEQ ID NO: 96 - protein, 13 aa, synthetic construct
  REGION 1..13: note = Modified peptide: Ac-[Pen]-N-T-[W(7-Me)]-[Lys(Ac)]-[Pen]-F-[Nal]-[aMeLys]-E-L -[3Pal]-[Sarc]-NH2
  SITE 1: note = Mod_Res - C-terminal is: ac
  SITE 1: note = misc_feature - Modified Amino Acid: Pen
  SITE 4: note = misc_feature - Modified Amino Acid: W7Me
  SITE 5: note = misc_feature - Modified Amino Acid: KAc
  SITE 6: note = misc_feature - Modified Amino Acid: Pen
  SITE 8: note = misc_feature - Modified Amino Acid: Nal
  SITE 9: note = misc_feature - Modified Amino Acid: aMeK
  SITE 12: note = misc_feature - Modified Amino Acid: 3Pya
  SITE 13: note = misc_feature - Modified Amino Acid: MeGly
  SITE 13: note = Mod_Res - N-terminal is: am
  REGION 1..6: note = Disulfid - Cyclic bond: Pen to Pen
XNTWKXFXKELXG

SEQ ID NO: 97 - protein, 13 aa, synthetic construct
  REGION 1..13: note = Modified peptide: Ac-[Pen]-N-T-[W(7-Me)]-[Lys(Ac)]-[Pen]-F-[Nal]-[THP]-E-L-[3 Pal]-[Sarc]-NH2
  SITE 1: note = Mod_Res - C-terminal is: ac
  SITE 1: note = misc_feature - Modified Amino Acid: Pen
  SITE 4: note = misc_feature - Modified Amino Acid: W7Me
  SITE 5: note = misc_feature - Modified Amino Acid: KAc
  SITE 6: note = misc_feature - Modified Amino Acid: Pen
  SITE 8: note = misc_feature - Modified Amino Acid: Nal
  SITE 9: note = misc_feature - Modified Amino Acid: THP
  SITE 12: note = misc_feature - Modified Amino Acid: 3Pya
  SITE 13: note = misc_feature - Modified Amino Acid: MeGly
  SITE 13: note = Mod_Res - N-terminal is: am
  REGION 1..6: note = Disulfid - Cyclic bond: Pen to Pen
XNTWKXFXXELXG

SEQ ID NO: 98 - protein, 13 aa, synthetic construct
  REGION 1..13: note = Modified peptide: Ac-[Hcy]-N-T-[W(7-Me)]-Q-[Pen]-[Phe(4-OMe)]-[Nal]-[THP]-[Ly s(Ac)]-L-[3Pal]-[Sarc]-NH2
  SITE 1: note = Mod_Res - C-terminal is: ac
  SITE 1: note = misc_feature - Modified Amino Acid: Hcy
  SITE 4: note = misc_feature - Modified Amino Acid: W7Me
  SITE 6: note = misc_feature - Modified Amino Acid: Pen
  SITE 7: note = misc_feature - Modified Amino Acid: F4Ad
  SITE 8: note = misc_feature - Modified Amino Acid: Nal
  SITE 9: note = misc_feature - Modified Amino Acid: THP
  SITE 10: note = misc_feature - Modified Amino Acid: KAc
  SITE 12: note = misc_feature - Modified Amino Acid: 3Pya
  SITE 13: note = misc_feature - Modified Amino Acid: MeGly
  SITE 13: note = Mod_Res - N-terminal is: am
  REGION 1..6: note = Disulfid - Cyclic bond: Hcy to Pen
XNTWQXXXXKLXG

SEQ ID NO: 99 - protein, 13 aa, synthetic construct
  REGION 1..13: note = Modified peptide: Ac-[Abu]-Q-T-[W(7-Me)]-[Cit]-[Pen]-[Phe(4-OMe)]-[Nal]-[THP] -[Lys(Ac)]-L-[3Pal]-[Sarc]-NH2
  SITE 1: note = Mod_Res - C-terminal is: ac
  SITE 1: note = misc_feature - Modified Amino Acid: Abu
  SITE 4: note = misc_feature - Modified Amino Acid: W7Me
  SITE 5: note = misc_feature - Modified Amino Acid: Cit
  SITE 6: note = misc_feature - Modified Amino Acid: Pen
  SITE 7: note = misc_feature - Modified Amino Acid: F4OMe
  SITE 8: note = misc_feature - Modified Amino Acid: Nal
  SITE 9: note = misc_feature - Modified Amino Acid: THP
  SITE 10: note = misc_feature - Modified Amino Acid: KAc
  SITE 12: note = misc_feature - Modified Amino Acid: 3Pya
  SITE 13: note = misc_feature - Modified Amino Acid: MeGly
  SITE 13: note = Mod_Res - N-terminal is: am
  REGION 1..6: note = Disulfid - Cyclic bond: Abu to Pen
XQTWXXXXXKLXG

SEQ ID NO: 100 - protein, 13 aa, synthetic construct
  REGION 1..13: note = Modified peptide: Ac-[Abu]-Q-T-[W(7-Me)]-[Lys(Ac)]-[Pen]-[Phe(4-OMe)]-[Nal]-[ THP]-[Lys(Ac)]-L-[3Pal]-[Sarc]-NH2
  SITE 1: note = Mod_Res - C-terminal is: ac
  SITE 1: note = misc_feature - Modified Amino Acid: Abu
  SITE 4: note = misc_feature - Modified Amino Acid: W7Me
  SITE 5: note = misc_feature - Modified Amino Acid: KAc
  SITE 6: note = misc_feature - Modified Amino Acid: Pen
  SITE 7: note = misc_feature - Modified Amino Acid: F4OMe
  SITE 8: note = misc_feature - Modified Amino Acid: Nal
  SITE 9: note = misc_feature - Modified Amino Acid: THP
  SITE 10: note = misc_feature - Modified Amino Acid: KAc
  SITE 12: note = misc_feature - Modified Amino Acid: 3Pya
  SITE 13: note = misc_feature - Modified Amino Acid: MeGly
  SITE 13: note = Mod_Res - N-terminal is: am
  REGION 1..6: note = Disulfid - Cyclic bond: Abu to Pen
XQTWKXXXXKLXG

SEQ ID NO: 101 - protein, 13 aa, synthetic construct
  REGION 1..13: note = Modified peptide: Ac-[Abu]-Q-T-[W(7-Me)]-Q-[Pen]-[Phe(4-OMe)]-[Nal]-[THP]-[Ly s(Ac)]-L-[3Pal]-[Sarc]-NH2
  SITE 1: note = Mod_Res - C-terminal is: ac
  SITE 1: note = misc_feature - Modified Amino Acid: Abu
  SITE 4: note = misc_feature - Modified Amino Acid: W7Me
  SITE 6: note = misc_feature - Modified Amino Acid: Pen
  SITE 7: note = misc_feature - Modified Amino Acid: F4OMe
  SITE 8: note = misc_feature - Modified Amino Acid: Nal
  SITE 9: note = misc_feature - Modified Amino Acid: THP
  SITE 10: note = misc_feature - Modified Amino Acid: KAc
  SITE 12: note = misc_feature - Modified Amino Acid: 3Pya
  SITE 13: note = misc_feature - Modified Amino Acid: MeGly
  SITE 13: note = Mod_Res - N-terminal is: am
  REGION 1..6: note = Disulfid - Cyclic bond: Abu to Pen
XQTWQXXXXKLXG

SEQ ID NO: 102 - protein, 13 aa, synthetic construct
  REGION 1..13: note = Modified peptide: Ac-[Hcy]-N-T-[W(7-Me)]-Q-[Pen]-[Phe(4-OMe)]-[Nal]-[THP]-[Ly s(Ac)]-A-[3Pal]-[Sarc]-NH2
  SITE 1: note = Mod_Res - C-terminal is: ac
  SITE 1: note = misc_feature - Modified Amino Acid: Hcy
  SITE 4: note = misc_feature - Modified Amino Acid: W7Me
  SITE 6: note = misc_feature - Modified Amino Acid: Pen
  SITE 7: note = misc_feature - Modified Amino Acid: F4OMe
  SITE 8: note = misc_feature - Modified Amino Acid: Nal
  SITE 9: note = misc_feature - Modified Amino Acid: THP
  SITE 10: note = misc_feature - Modified Amino Acid: KAc
  SITE 12: note = misc_feature - Modified Amino Acid: 3Pya
  SITE 13: note = misc_feature - Modified Amino Acid: MeGly
  SITE 13: note = Mod_Res - N-terminal is: am
  REGION 1..6: note = Disulfid - Cyclic bond: Hcy to Pen
XNTWQXXXXKAXG

SEQ ID NO: 103 - protein, 13 aa, synthetic construct
  REGION 1..13: note = Modified peptide: Ac-[Abu]-Q-T-[W(7-Me)]-[Cit]-[Pen]-[Phe(4-OMe)]-[Nal]-[THP] -[Lys(Ac)]-A-[3Pal]-[Sarc]-NH2
  SITE 1: note = Mod_Res - C-terminal is: ac
  SITE 1: note = misc_feature - Modified Amino Acid: Abu
  SITE 4: note = misc_feature - Modified Amino Acid: W7Me
  SITE 5: note = misc_feature - Modified Amino Acid: Cit
  SITE 6: note = misc_feature - Modified Amino Acid: Pen
  SITE 7: note = misc_feature - Modified Amino Acid: F4OMe
  SITE 8: note = misc_feature - Modified Amino Acid: Nal
  SITE 9: note = misc_feature - Modified Amino Acid: THP
  SITE 10: note = misc_feature - Modified Amino Acid: KAc
  SITE 12: note = misc_feature - Modified Amino Acid: 3Pya
  SITE 13: note = misc_feature - Modified Amino Acid: MeGly
  SITE 13: note = Mod_Res - N-terminal is: am
  REGION 1..6: note = Disulfid - Cyclic bond: Abu to Pen
XQTWXXXXXKAXG

SEQ ID NO: 104 - protein, 13 aa, synthetic construct
  REGION 1..13: note = Modified peptide: Ac-[Abu]-Q-T-[W(7-Me)]-[Lys(Ac)]-[Pen]-[Phe(4-OMe)]-[Nal]-[ THP]-[Lys(Ac)]-A-[3Pal]-[Sarc]-NH2
  SITE 1: note = Mod_Res - C-terminal is: ac
  SITE 1: note = misc_feature - Modified Amino Acid: Abu
  SITE 4: note = misc_feature - Modified Amino Acid: W7Me
  SITE 5: note = misc_feature - Modified Amino Acid: KAc
  SITE 6: note = misc_feature - Modified Amino Acid: Pen
  SITE 7: note = misc_feature - Modified Amino Acid: F4OMe
  SITE 8: note = misc_feature - Modified Amino Acid: Nal
  SITE 9: note = misc_feature - Modified Amino Acid: THP
  SITE 10: note = misc_feature - Modified Amino Acid: KAc
  SITE 12: note = misc_feature - Modified Amino Acid: 3Pya
  SITE 13: note = misc_feature - Modified Amino Acid: MeGly
  SITE 13: note = Mod_Res - N-terminal is: am
  REGION 1..6: note = Disulfid - Cyclic bond: Abu to Pen
XQTWKXXXXKAXG

SEQ ID NO: 105 - protein, 13 aa, synthetic construct
  REGION 1..13: note = Modified peptide: Ac-[Abu]-Q-T-[W(7-Me)]-Q-[Pen]-[Phe(4-OMe)]-[Nal]-[THP]-[Ly s(Ac)]-A-[3Pal]-[Sarc]-NH2
  SITE 1: note = Mod_Res - C-terminal is: ac
  SITE 1: note = misc_feature - Modified Amino Acid: Abu
  SITE 4: note = misc_feature - Modified Amino Acid: W7Me
  SITE 6: note = misc_feature - Modified Amino Acid: Pen
  SITE 7: note = misc_feature - Modified Amino Acid: F4OMe
  SITE 8: note = misc_feature - Modified Amino Acid: Nal
  SITE 9: note = misc_feature - Modified Amino Acid: THP
  SITE 10: note = misc_feature - Modified Amino Acid: KAc
  SITE 12: note = misc_feature - Modified Amino Acid: 3Pya
  SITE 13: note = misc_feature - Modified Amino Acid: MeGly
  SITE 13: note = Mod_Res - N-terminal is: am
  REGION 1..6: note = Disulfid - Cyclic bond: Abu to Pen
XQTWQXXXXKAXG

SEQ ID NO: 106 - protein, 12 aa, synthetic construct
  REGION 1..12: note = Modified peptide: Ac-[Pen]-[Asn(4C13_2N15)]-T-[W(7-Me)]-[Lys(Ac)]-[Pen]-[Phe( 4-(2-aminoethoxy))]-[Nal]-[aMeLys]-[Lys(Ac)]-[Asn(4C13_2N15 )]-[(D)Leu]-NH2
  SITE 1: note = Mod_Res - C-terminal is: ac
  SITE 1: note = misc_feature - Modified Amino Acid: Pen
  SITE 2: note = misc_feature - Modified Amino Acid: Asn(4C13_2N15)
  SITE 4: note = misc_feature - Modified Amino Acid: W7Me
  SITE 5: note = misc_feature - Modified Amino Acid: KAc
  SITE 6: note = misc_feature - Modified Amino Acid: Pen
  SITE 7: note = misc_feature - Modified Amino Acid: AEF
  SITE 8: note = misc_feature - Modified Amino Acid: Nal
  SITE 9: note = misc_feature - Modified Amino Acid: aMeK
  SITE 10: note = misc_feature - Modified Amino Acid: KAc
  SITE 11: note = misc_feature - Modified Amino Acid: Asn(4C13_2N15)
  SITE 12: note = misc_feature - Modified Amino Acid: dL
  SITE 12: note = Mod_Res - N-terminal is: am
  REGION 1..6: note = Disulfid - Cyclic bond: Pen to Pen
XXTWKXXXKKXL

SEQ ID NO: 107 - protein, 13 aa, synthetic construct
  REGION 1..13: note = Modified peptide: Ac-[Pen]-N-T-[W(7-Me)]-[Lys(IsoButyl_Ac)]-[Pen]-[Phe(4-OMe) ]-[Nal]-[THP]-L-L-[3Pal]-[Sarc]-NH2
  SITE 1: note = Mod_Res - C-terminal is: ac
  SITE 1: note = misc_feature - Modified Amino Acid: Pen
  SITE 4: note = misc_feature - Modified Amino Acid: W7Me
  SITE 5: note = misc_feature - Modified Amino Acid: K(IsoButyl_Ac)
  SITE 6: note = misc_feature - Modified Amino Acid: Pen
  SITE 7: note = misc_feature - Modified Amino Acid: F4OMe
  SITE 8: note = misc_feature - Modified Amino Acid: Nal
  SITE 9: note = misc_feature - Modified Amino Acid: THP
  SITE 12: note = misc_feature - Modified Amino Acid: 3Pya
  SITE 13: note = misc_feature - Modified Amino Acid: MeGly
  SITE 13: note = Mod_Res - N-terminal is: am
  REGION 1..6: note = Disulfid - Cyclic bond: Pen to Pen
XNTWXXXXXLLXG

SEQ ID NO: 108 - protein, 13 aa, synthetic construct
  REGION 1..13: note = Modified peptide: Ac-[Pen]-I-T-[W(7-Me)]-[Lys(Ac)]-[Pen]-[Phe(4-Ad)]-[Nal]-[T HP]-[Lys(Ac)]-I-[3Pal]-[MeLeu]-NH2
  SITE 1: note = Mod_Res - C-terminal is: ac
  SITE 1: note = misc_feature - Modified Amino Acid: Pen
  SITE 4: note = misc_feature - Modified Amino Acid: W7Me
  SITE 5: note = misc_feature - Modified Amino Acid: KAc
  SITE 6: note = misc_feature - Modified Amino Acid: Pen
  SITE 7: note = misc_feature - Modified Amino Acid: F4Ad
  SITE 8: note = misc_feature - Modified Amino Acid: Nal
  SITE 9: note = misc_feature - Modified Amino Acid: THP
  SITE 10: note = misc_feature - Modified Amino Acid: KAc
  SITE 12: note = misc_feature - Modified Amino Acid: 3Pya
  SITE 13: note = misc_feature - Modified Amino Acid: MeLeu
  SITE 13: note = Mod_Res - N-terminal is: am
  REGION 1..6: note = Disulfid - Cyclic bond: Pen to Pen
XITWKXXXXKIXL

SEQ ID NO: 109 - protein, 13 aa, synthetic construct
  REGION 1..13: note = Modified peptide: Ac-[Pen]-I-T-[W(7-Me)]-[Lys(Ac)]-[Pen]-[Phe(4-Ad)]-[Nal]-[T HP]-[Lys(Ac)]-I-[3Pal]-[(D)Leu]-NH2
  SITE 1: note = Mod_Res - C-terminal is: ac
  SITE 1: note = misc_feature - Modified Amino Acid: Pen
  SITE 4: note = misc_feature - Modified Amino Acid: W7Me
  SITE 5: note = misc_feature - Modified Amino Acid: KAc
  SITE 6: note = misc_feature - Modified Amino Acid: Pen
  SITE 7: note = misc_feature - Modified Amino Acid: F4Ad
  SITE 8: note = misc_feature - Modified Amino Acid: Nal
  SITE 9: note = misc_feature - Modified Amino Acid: THP
  SITE 10: note = misc_feature - Modified Amino Acid: KAc
  SITE 12: note = misc_feature - Modified Amino Acid: 3Pya
  SITE 13: note = misc_feature - Modified Amino Acid: dL
  SITE 13: note = Mod_Res - N-terminal is: am
  REGION 1..6: note = Disulfid - Cyclic bond: Pen to Pen
XITWKXXXXKIXL

SEQ ID NO: 110 - protein, 13 aa, synthetic construct
  REGION 1..13: note = Modified peptide: Ac-[Pen]-N-T-[W(7-Me)]-[Lys(Ac)]-[Pen]-[Phe(4-Ad)]-[Nal]-[T HP]-[Lys(Ac)]-I-[3Pal]-[(D)Leu]-NH2
  SITE 1: note = Mod_Res - C-terminal is: ac
  SITE 1: note = misc_feature - Modified Amino Acid: Pen
  SITE 4: note = misc_feature - Modified Amino Acid: W7Me
  SITE 5: note = misc_feature - Modified Amino Acid: KAc
  SITE 6: note = misc_feature - Modified Amino Acid: Pen
  SITE 7: note = misc_feature - Modified Amino Acid: F4Ad
  SITE 8: note = misc_feature - Modified Amino Acid: Nal
  SITE 9: note = misc_feature - Modified Amino Acid: THP
  SITE 10: note = misc_feature - Modified Amino Acid: KAc
  SITE 12: note = misc_feature - Modified Amino Acid: 3Pya
  SITE 13: note = misc_feature - Modified Amino Acid: dL
  SITE 13: note = Mod_Res - N-terminal is: am
  REGION 1..6: note = Disulfid - Cyclic bond: Pen to Pen
XNTWKXXXXKIXL

SEQ ID NO: 111 - protein, 13 aa, synthetic construct
  REGION 1..13: note = Modified peptide: Ac-[Pen]-N-T-[W(7-Me)]-[Lys(Ac)]-[Pen]-[Phe(4-Ad)]-[Nal]-[T HP]-[Lys(Ac)]-L-[3Pal]-[N-MeNle]-NH2
  SITE 1: note = Mod_Res - C-terminal is: ac
  SITE 1: note = misc_feature - Modified Amino Acid: Pen
  SITE 4: note = misc_feature - Modified Amino Acid: W7Me
  SITE 5: note = misc_feature - Modified Amino Acid: KAc
  SITE 6: note = misc_feature - Modified Amino Acid: Pen
  SITE 7: note = misc_feature - Modified Amino Acid: F4Ad
  SITE 8: note = misc_feature - Modified Amino Acid: Nal
  SITE 9: note = misc_feature - Modified Amino Acid: THP
  SITE 10: note = misc_feature - Modified Amino Acid: KAc
  SITE 12: note = misc_feature - Modified Amino Acid: 3Pya
  SITE 13: note = misc_feature - Modified Amino Acid: N-MeNle
  SITE 13: note = Mod_Res - N-terminal is: am
  REGION 1..6: note = Disulfid - Cyclic bond: Pen to Pen
XNTWKXXXXKLXX

SEQ ID NO: 112 - protein, 12 aa, synthetic construct
  REGION 1..12: note = Modified peptide: Ac-[Abu]-T-[W(7-Me)]-[Lys(Ac)]-[Pen]-[Phe(4-(2-aminoethoxy) )]-[Nal]-[THP]-E-N-[3Pal]-[Sarc]-NH2
  SITE 1: note = Mod_Res - C-terminal is: ac
  SITE 1: note = misc_feature - Modified Amino Acid: Abu
  SITE 3: note = misc_feature - Modified Amino Acid: W7Me
  SITE 4: note = misc_feature - Modified Amino Acid: KAc
  SITE 5: note = misc_feature - Modified Amino Acid: Pen
  SITE 6: note = misc_feature - Modified Amino Acid: AEF
  SITE 7: note = misc_feature - Modified Amino Acid: Nal
  SITE 8: note = misc_feature - Modified Amino Acid: THP
  SITE 11: note = misc_feature - Modified Amino Acid: 3Pya
  SITE 12: note = misc_feature - Modified Amino Acid: MeGly
  SITE 12: note = Mod_Res - N-terminal is: am
  REGION 1..5: note = Disulfid - Cyclic bond: Abu to Pen
XTWKXXXXENXG

SEQ ID NO: 113 - protein, 12 aa, synthetic construct
  REGION 1..12: note = Modified peptide: Ac-[Pen]-T-[W(7-Me)]-[Lys(Ac)]-C-[Phe(4-Ad)]-[Nal]-[THP]-E- N-[3Pal]-[Sarc]-NH2
  SITE 1: note = Mod_Res - C-terminal is: ac
  SITE 1: note = misc_feature - Modified Amino Acid: Pen
  SITE 3: note = misc_feature - Modified Amino Acid: W7Me
  SITE 4: note = misc_feature - Modified Amino Acid: KAc
  SITE 6: note = misc_feature - Modified Amino Acid: F4Ad
  SITE 7: note = misc_feature - Modified Amino Acid: Nal
  SITE 8: note = misc_feature - Modified Amino Acid: THP
  SITE 11: note = misc_feature - Modified Amino Acid: 3Pya
  SITE 12: note = misc_feature - Modified Amino Acid: MeGly
  SITE 12: note = Mod_Res - N-terminal is: am
  REGION 1..5: note = Disulfid - Cyclic bond: Pen to C
XTWKCXXXENXG

SEQ ID NO: 114 - protein, 12 aa, synthetic construct
  REGION 1..12: note = Modified peptide: Ac-[Pen]-T-[W(7-Me)]-[Lys(Ac)]-[Hcy]-[Phe(4-Ad)]-[Nal]-[THP ]-E-N-[3Pal]-[Sarc]-NH2
  SITE 1: note = Mod_Res - C-terminal is: ac
  SITE 1: note = misc_feature - Modified Amino Acid: Pen
  SITE 3: note = misc_feature - Modified Amino Acid: W7Me
  SITE 4: note = misc_feature - Modified Amino Acid: KAc
  SITE 5: note = misc_feature - Modified Amino Acid: Hcy
  SITE 6: note = misc_feature - Modified Amino Acid: F4Ad
  SITE 7: note = misc_feature - Modified Amino Acid: Nal
  SITE 8: note = misc_feature - Modified Amino Acid: THP
  SITE 11: note = misc_feature - Modified Amino Acid: 3Pya
  SITE 12: note = misc_feature - Modified Amino Acid: MeGly
  SITE 12: note = Mod_Res - N-terminal is: am
  REGION 1..5: note = Disulfid - Cyclic bond: Pen to Hcy
XTWKXXXXENXG

SEQ ID NO: 115 - protein, 12 aa, synthetic construct
  REGION 1..12: note = Modified peptide: Ac-C-T-[W(7-Me)]-[Lys(Ac)]-[Pen]-[Phe(4-Ad)]-[Nal]-[THP]-E- N-[3Pal]-[Sarc]-NH2
  SITE 1: note = Mod_Res - C-terminal is: ac
  SITE 3: note = misc_feature - Modified Amino Acid: W7Me
  SITE 4: note = misc_feature - Modified Amino Acid: KAc
  SITE 5: note = misc_feature - Modified Amino Acid: Pen
  SITE 6: note = misc_feature - Modified Amino Acid: F4Ad
  SITE 7: note = misc_feature - Modified Amino Acid: Nal
  SITE 8: note = misc_feature - Modified Amino Acid: THP
  SITE 11: note = misc_feature - Modified Amino Acid: 3Pya
  SITE 12: note = misc_feature - Modified Amino Acid: MeGly
  SITE 12: note = Mod_Res - N-terminal is: am
  REGION 1..5: note = Disulfid - Cyclic bond: C to Pen
CTWKXXXXENXG

SEQ ID NO: 116 - protein, 12 aa, synthetic construct
  REGION 1..12: note = Modified peptide: Ac-[Pen]-T-[W(7-Me)]-[Lys(Ac)]-[Pen]-[Phe(4-Ad)]-[Nal]-[THP ]-E-N-[3Pal]-[Sarc]-NH2
  SITE 1: note = Mod_Res - C-terminal is: ac
  SITE 1: note = misc_feature - Modified Amino Acid: Pen
  SITE 3: note = misc_feature - Modified Amino Acid: W7Me
  SITE 4: note = misc_feature - Modified Amino Acid: KAc
  SITE 5: note = misc_feature - Modified Amino Acid: Pen
  SITE 6: note = misc_feature - Modified Amino Acid: F4Ad
  SITE 7: note = misc_feature - Modified Amino Acid: Nal
  SITE 8: note = misc_feature - Modified Amino Acid: THP
  SITE 11: note = misc_feature - Modified Amino Acid: 3Pya
  SITE 12: note = misc_feature - Modified Amino Acid: MeGly
  SITE 12: note = Mod_Res - N-terminal is: am
  REGION 1..5: note = Disulfid - Cyclic bond: Pen to Pen
XTWKXXXXENXG

SEQ ID NO: 117 - protein, 12 aa, synthetic construct
  REGION 1..12: note = Modified peptide: Ac-[Hcy]-T-[W(7-Me)]-[Lys(Ac)]-[Pen]-[Phe(4-Ad)]-[Nal]-[THP ]-E-N-[3Pal]-[Sarc]-NH2
  SITE 1: note = Mod_Res - C-terminal is: ac
  SITE 1: note = misc_feature - Modified Amino Acid: Hcy
  SITE 3: note = misc_feature - Modified Amino Acid: W7Me
  SITE 4: note = misc_feature - Modified Amino Acid: KAc
  SITE 5: note = misc_feature - Modified Amino Acid: Pen
  SITE 6: note = misc_feature - Modified Amino Acid: F4Ad
  SITE 7: note = misc_feature - Modified Amino Acid: Nal
  SITE 8: note = misc_feature - Modified Amino Acid: THP
  SITE 11: note = misc_feature - Modified Amino Acid: 3Pya
  SITE 12: note = misc_feature - Modified Amino Acid: MeGly
  SITE 12: note = Mod_Res - N-terminal is: am
  REGION 1..5: note = Disulfid - Cyclic bond: Hcy to Pen
XTWKXXXXENXG

SEQ ID NO: 118 - protein, 13 aa, synthetic construct
  REGION 1..13: note = Modified peptide: Ac-[Pen]-N-L-[W(7-Me)]-[Lys(Ac)]-[Pen]-[Phe(4-OMe)]-[Nal]-[ aMeLeu]-L-N-[3Pal]-[Sarc]-NH2
  SITE 1: note = Mod_Res - C-terminal is: ac
  SITE 1: note = misc_feature - Modified Amino Acid: Pen
  SITE 4: note = misc_feature - Modified Amino Acid: W7Me
  SITE 5: note = misc_feature - Modified Amino Acid: KAc
  SITE 6: note = misc_feature - Modified Amino Acid: Pen
  SITE 7: note = misc_feature - Modified Amino Acid: F4OMe
  SITE 8: note = misc_feature - Modified Amino Acid: Nal
  SITE 9: note = misc_feature - Modified Amino Acid: aMeLeu
  SITE 12: note = misc_feature - Modified Amino Acid: 3Pya
  SITE 13: note = misc_feature - Modified Amino Acid: MeGly
  SITE 13: note = Mod_Res - N-terminal is: am
  REGION 1..6: note = Disulfid - Cyclic bond: Pen to Pen
XNLWKXXXLLNXG

SEQ ID NO: 119 - protein, 13 aa, synthetic construct
  REGION 1..13: note = Modified peptide: Ac-[Pen]-N-L-[W(7-Me)]-[Lys(Ac)]-[Pen]-[Phe(4-OMe)]-[Nal]-[ aMeLeu]-E-L-[3Pal]-[Sarc]-NH2
  SITE 1: note = Mod_Res - C-terminal is: ac
  SITE 1: note = misc_feature - Modified Amino Acid: Pen
  SITE 4: note = misc_feature - Modified Amino Acid: W7Me
  SITE 5: note = misc_feature - Modified Amino Acid: KAc
  SITE 6: note = misc_feature - Modified Amino Acid: Pen
  SITE 7: note = misc_feature - Modified Amino Acid: F4OMe
  SITE 8: note = misc_feature - Modified Amino Acid: Nal
  SITE 9: note = misc_feature - Modified Amino Acid: aMeLeu
  SITE 12: note = misc_feature - Modified Amino Acid: 3Pya
  SITE 13: note = misc_feature - Modified Amino Acid: MeGly
  SITE 13: note = Mod_Res - N-terminal is: am
  REGION 1..6: note = Disulfid - Cyclic bond: Pen to Pen
XNLWKXXXLELXG

SEQ ID NO: 120 - protein, 13 aa, synthetic construct
  REGION 1..13: note = Modified peptide: Ac-[Pen]-[nLeu]-T-[W(7-Me)]-[Lys(Ac)]-[Pen]-[Phe(4-(2-amino ethoxy))]-[Nal]-[THP]-[nLeu]-N-[3Pal]-[Sarc]-NH2
  SITE 1: note = Mod_Res - C-terminal is: ac
  SITE 1: note = misc_feature - Modified Amino Acid: Pen
  SITE 2: note = misc_feature - Modified Amino Acid: nLeu
  SITE 4: note = misc_feature - Modified Amino Acid: W7Me
  SITE 5: note = misc_feature - Modified Amino Acid: KAc
  SITE 6: note = misc_feature - Modified Amino Acid: Pen
  SITE 7: note = misc_feature - Modified Amino Acid: AEF
  SITE 8: note = misc_feature - Modified Amino Acid: Nal
  SITE 9: note = misc_feature - Modified Amino Acid: THP
  SITE 10: note = misc_feature - Modified Amino Acid: nLeu
  SITE 12: note = misc_feature - Modified Amino Acid: 3Pya
  SITE 13: note = misc_feature - Modified Amino Acid: MeGly
  SITE 13: note = Mod_Res - N-terminal is: am
  REGION 1..6: note = Disulfid - Cyclic bond: Pen to Pen
XLTWKXXXXLNXG

SEQ ID NO: 121 - protein, 13 aa, synthetic construct
  REGION 1..13: note = Modified peptide: Ac-[Pen]-L-T-[W(7-Me)]-[Lys(Ac)]-[Pen]-[Spiral_Pip]-[Nal]-[ aMeLeu]-E-N-[3Pal]-[Sarc]-NH2
  SITE 1: note = Mod_Res - C-terminal is: ac
  SITE 1: note = misc_feature - Modified Amino Acid: Pen
  SITE 4: note = misc_feature - Modified Amino Acid: W7Me
  SITE 5: note = misc_feature - Modified Amino Acid: KAc
  SITE 6: note = misc_feature - Modified Amino Acid: Pen
  SITE 7: note = misc_feature - Modified Amino Acid: Spiral_Pip
  SITE 8: note = misc_feature - Modified Amino Acid: Nal
  SITE 9: note = misc_feature - Modified Amino Acid: aMeLeu
  SITE 12: note = misc_feature - Modified Amino Acid: 3Pya
  SITE 13: note = misc_feature - Modified Amino Acid: MeGly
  SITE 13: note = Mod_Res - N-terminal is: am
  REGION 1..6: note = Disulfid - Cyclic bond: Pen to Pen
XLTWKXXXLENXG

SEQ ID NO: 122 - protein, 13 aa, synthetic construct
  REGION 1..13: note = Modified peptide: Ac-[Pen]-N-T-[W(7-Me)]-[Lys(Ac)]-[Pen]-[Phe(4-Me)]-[Nal]-[a MeLys]-E-L-[3Pal]-[Sarc]-NH2
  SITE 1: note = Mod_Res - C-terminal is: ac
  SITE 1: note = misc_feature - Modified Amino Acid: Pen
  SITE 4: note = misc_feature - Modified Amino Acid: W7Me
  SITE 5: note = misc_feature - Modified Amino Acid: KAc
  SITE 6: note = misc_feature - Modified Amino Acid: Pen
  SITE 7: note = misc_feature - Modified Amino Acid: F4Me
  SITE 8: note = misc_feature - Modified Amino Acid: Nal
  SITE 9: note = misc_feature - Modified Amino Acid: aMeK
  SITE 12: note = misc_feature - Modified Amino Acid: 3Pya
  SITE 13: note = misc_feature - Modified Amino Acid: MeGly
  SITE 13: note = Mod_Res - N-terminal is: am
  REGION 1..6: note = Disulfid - Cyclic bond: Pen to Pen
XNTWKXXXKELXG

SEQ ID NO: 123 - protein, 13 aa, synthetic construct
  REGION 1..13: note = Modified peptide: Ac-[Pen]-N-L-[W(7-Me)]-[Lys(Ac)]-[Pen]-[Phe(4-Ad)]-[Nal]-[a MeLeu]-E-L-[3Pal]-[Sarc]-NH2
  SITE 1: note = Mod_Res - C-terminal is: ac
  SITE 1: note = misc_feature - Modified Amino Acid: Pen
  SITE 4: note = misc_feature - Modified Amino Acid: W7Me
  SITE 5: note = misc_feature - Modified Amino Acid: KAc
  SITE 6: note = misc_feature - Modified Amino Acid: Pen
  SITE 7: note = misc_feature - Modified Amino Acid: F4Ad
  SITE 8: note = misc_feature - Modified Amino Acid: Nal
  SITE 9: note = misc_feature - Modified Amino Acid: aMeLeu
  SITE 12: note = misc_feature - Modified Amino Acid: 3Pya
  SITE 13: note = misc_feature - Modified Amino Acid: MeGly
  SITE 13: note = Mod_Res - N-terminal is: am
  REGION 1..6: note = Disulfid - Cyclic bond: Pen to Pen
XNLWKXXXLELXG

SEQ ID NO: 124 - protein, 13 aa, synthetic construct
  REGION 1..13: note = Modified peptide: Ac-[Pen]-N-T-[W(7-Me)]-[Lys(Ac)]-[Pen]-[Phe(4-Me)]-[Nal]-[a MeLys]-[Lys(Ac)]-L-[3Pal]-[Sarc]-NH2
  SITE 1: note = Mod_Res - C-terminal is: ac
  SITE 1: note = misc_feature - Modified Amino Acid: Pen
  SITE 4: note = misc_feature - Modified Amino Acid: W7Me
  SITE 5: note = misc_feature - Modified Amino Acid: KAc
  SITE 6: note = misc_feature - Modified Amino Acid: Pen
  SITE 7: note = misc_feature - Modified Amino Acid: F4Me
  SITE 8: note = misc_feature - Modified Amino Acid: Nal
  SITE 9: note = misc_feature - Modified Amino Acid: aMeK
  SITE 10: note = misc_feature - Modified Amino Acid: KAc
  SITE 12: note = misc_feature - Modified Amino Acid: 3Pya
  SITE 13: note = misc_feature - Modified Amino Acid: MeGly
  SITE 13: note = Mod_Res - N-terminal is: am
  REGION 1..6: note = Disulfid - Cyclic bond: Pen to Pen
XNTWKXXXKKLXG

SEQ ID NO: 125 - protein, 13 aa, synthetic construct
  REGION 1..13: note = Modified peptide: Ac-[Pen]-N-T-[W(7-Me)]-[Lys(Ac)]-[Pen]-F-[Nal]-[aMeLys]-[Ly s(Ac)]-L-[3Pal]-[Sarc]-NH2
  SITE 1: note = Mod_Res - C-terminal is: ac
  SITE 1: note = misc_feature - Modified Amino Acid: Pen
  SITE 4: note = misc_feature - Modified Amino Acid: W7Me
  SITE 5: note = misc_feature - Modified Amino Acid: KAc
  SITE 6: note = misc_feature - Modified Amino Acid: Pen
  SITE 8: note = misc_feature - Modified Amino Acid: Nal
  SITE 9: note = misc_feature - Modified Amino Acid: aMeK
  SITE 10: note = misc_feature - Modified Amino Acid: KAc
  SITE 12: note = misc_feature - Modified Amino Acid: 3Pya
  SITE 13: note = misc_feature - Modified Amino Acid: MeGly
  SITE 13: note = Mod_Res - N-terminal is: am
  REGION 1..6: note = Disulfid - Cyclic bond: Pen to Pen
XNTWKXFXKKLXG

SEQ ID NO: 126 - protein, 13 aa, synthetic construct
  REGION 1..13: note = Modified peptide: Ac-[Pen]-N-T-[W(7-Me)]-[Lys(Ac)]-[Pen]-[Phe(4-Ad)]-[Nal]-[T HP]-[Lys(Ac)]-I-[3Pal]-[MeLeu]-NH2
  SITE 1: note = Mod_Res - C-terminal is: ac
  SITE 1: note = misc_feature - Modified Amino Acid: Pen
  SITE 4: note = misc_feature - Modified Amino Acid: W7Me
  SITE 5: note = misc_feature - Modified Amino Acid: KAc
  SITE 6: note = misc_feature - Modified Amino Acid: Pen
  SITE 7: note = misc_feature - Modified Amino Acid: F4Ad
  SITE 8: note = misc_feature - Modified Amino Acid: Nal
  SITE 9: note = misc_feature - Modified Amino Acid: THP
  SITE 10: note = misc_feature - Modified Amino Acid: KAc
  SITE 12: note = misc_feature - Modified Amino Acid: 3Pya
  SITE 13: note = misc_feature - Modified Amino Acid: MeLeu
  SITE 13: note = Mod_Res - N-terminal is: am
  REGION 1..6: note = Disulfid - Cyclic bond: Pen to Pen
XNTWKXXXXKIXL

SEQ ID NO: 127 - protein, 13 aa, synthetic construct
  REGION 1..13: note = Modified peptide: Ac-[Pen]-L-T-[W(7-Me)]-[Lys(Ac)]-[Pen]-L-[Nal]-[THP]-L-N-[3 Pal]-[Sarc]-NH2
  SITE 1: note = Mod_Res - C-terminal is: ac
  SITE 1: note = misc_feature - Modified Amino Acid: Pen
  SITE 4: note = misc_feature - Modified Amino Acid: W7Me
  SITE 5: note = misc_feature - Modified Amino Acid: KAc
  SITE 6: note = misc_feature - Modified Amino Acid: Pen
  SITE 8: note = misc_feature - Modified Amino Acid: Nal
  SITE 9: note = misc_feature - Modified Amino Acid: THP
  SITE 12: note = misc_feature - Modified Amino Acid: 3Pya
  SITE 13: note = misc_feature - Modified Amino Acid: MeGly
  SITE 13: note = Mod_Res - N-terminal is: am
  REGION 1..6: note = Disulfid - Cyclic bond: Pen to Pen
XLTWKXLXXLNXG

SEQ ID NO: 128 - protein, 13 aa, synthetic construct
  REGION 1..13: note = Modified peptide: Ac-[Pen]-N-T-[W(7-Me)]-[Lys(Ac)]-[Pen]-L-[Nal]-[THP]-L-N-[3 Pal]-[Sarc]-NH2
  SITE 1: note = Mod_Res - C-terminal is: ac
  SITE 1: note = misc_feature - Modified Amino Acid: Pen
  SITE 4: note = misc_feature - Modified Amino Acid: W7Me
  SITE 5: note = misc_feature - Modified Amino Acid: KAc
  SITE 6: note = misc_feature - Modified Amino Acid: Pen
  SITE 8: note = misc_feature - Modified Amino Acid: Nal
  SITE 9: note = misc_feature - Modified Amino Acid: THP
  SITE 12: note = misc_feature - Modified Amino Acid: 3Pya
  SITE 13: note = misc_feature - Modified Amino Acid: MeGly
  SITE 13: note = Mod_Res - N-terminal is: am
  REGION 1..6: note = Disulfid - Cyclic bond: Pen to Pen
XNTWKXLXXLNXG

SEQ ID NO: 129 - protein, 13 aa, synthetic construct
  REGION 1..13: note = Modified peptide: Ac-[Pen]-N-T-[W(7-Me)]-[Lys(Ac)]-[Pen]-L-[Nal]-[THP]-E-N-[3 Pal]-[Sarc]-NH2
  SITE 1: note = Mod_Res - C-terminal is: ac
  SITE 1: note = misc_feature - Modified Amino Acid: Pen
  SITE 4: note = misc_feature - Modified Amino Acid: W7Me
  SITE 5: note = misc_feature - Modified Amino Acid: KAc
  SITE 6: note = misc_feature - Modified Amino Acid: Pen
  SITE 8: note = misc_feature - Modified Amino Acid: Nal
  SITE 9: note = misc_feature - Modified Amino Acid: THP
  SITE 12: note = misc_feature - Modified Amino Acid: 3Pya
  SITE 13: note = misc_feature - Modified Amino Acid: MeGly
  SITE 13: note = Mod_Res - N-terminal is: am
  REGION 1..6: note = Disulfid - Cyclic bond: Pen to Pen
XNTWKXLXXENXG

SEQ ID NO: 130 - protein, 13 aa, synthetic construct
  REGION 1..13: note = Modified peptide: Ac-[Pen]-L-T-[W(7-Me)]-[Lys(Ac)]-[Pen]-[Phe(4-CN)]-[Nal]-[T HP]-L-N-[3Pal]-[Sarc]-NH2
  SITE 1: note = Mod_Res - C-terminal is: ac
  SITE 1: note = misc_feature - Modified Amino Acid: Pen
  SITE 4: note = misc_feature - Modified Amino Acid: W7Me
  SITE 5: note = misc_feature - Modified Amino Acid: KAc
  SITE 6: note = misc_feature - Modified Amino Acid: Pen
  SITE 7: note = misc_feature - Modified Amino Acid: F4CN
  SITE 8: note = misc_feature - Modified Amino Acid: Nal
  SITE 9: note = misc_feature - Modified Amino Acid: THP
  SITE 12: note = misc_feature - Modified Amino Acid: 3Pya
  SITE 13: note = misc_feature - Modified Amino Acid: MeGly
  SITE 13: note = Mod_Res - N-terminal is: am
  REGION 1..6: note = Disulfid - Cyclic bond: Pen to Pen
XLTWKXXXXLNXG

SEQ ID NO: 131 - protein, 13 aa, synthetic construct
  REGION 1..13: note = Modified peptide: Ac-[Pen]-N-T-[W(7-Me)]-[Lys(Ac)]-[Pen]-[Phe(4-CN)]-[Nal]-[T HP]-L-N-[3Pal]-[Sarc]-NH2
  SITE 1: note = Mod_Res - C-terminal is: ac
  SITE 1: note = misc_feature - Modified Amino Acid: Pen
  SITE 4: note = misc_feature - Modified Amino Acid: W7Me
  SITE 5: note = misc_feature - Modified Amino Acid: KAc
  SITE 6: note = misc_feature - Modified Amino Acid: Pen
  SITE 7: note = misc_feature - Modified Amino Acid: F4CN
  SITE 8: note = misc_feature - Modified Amino Acid: Nal
  SITE 9: note = misc_feature - Modified Amino Acid: THP
  SITE 12: note = misc_feature - Modified Amino Acid: 3Pya
  SITE 13: note = misc_feature - Modified Amino Acid: MeGly
  SITE 13: note = Mod_Res - N-terminal is: am
  REGION 1..6: note = Disulfid - Cyclic bond: Pen to Pen
XNTWKXXXXLNXG

SEQ ID NO: 132 - protein, 13 aa, synthetic construct
  REGION 1..13: note = Modified peptide: Ac-[Pen]-N-L-[W(7-Me)]-[Lys(Ac)]-[Pen]-[Phe(4-(2-aminoethox y))]-[Nal]-[THP]-E-L-[3Pal]-[Sarc]-NH2
  SITE 1: note = Mod_Res - C-terminal is: ac
  SITE 1: note = misc_feature - Modified Amino Acid: Pen
  SITE 4: note = misc_feature - Modified Amino Acid: W7Me
  SITE 5: note = misc_feature - Modified Amino Acid: KAc
  SITE 6: note = misc_feature - Modified Amino Acid: Pen
  SITE 7: note = misc_feature - Modified Amino Acid: AEF
  SITE 8: note = misc_feature - Modified Amino Acid: Nal
  SITE 9: note = misc_feature - Modified Amino Acid: THP
  SITE 12: note = misc_feature - Modified Amino Acid: 3Pya
  SITE 13: note = misc_feature - Modified Amino Acid: MeGly
  SITE 13: note = Mod_Res - N-terminal is: am
  REGION 1..6: note = Disulfid - Cyclic bond: Pen to Pen
XNLWKXXXXELXG

SEQ ID NO: 133 - protein, 12 aa, synthetic construct
  REGION 1..12: note = Modified peptide: Ac-[(D)Pen]-T-[W(7-Me)]-[Lys(Ac)]-[Pen]-[Phe(4-(2-aminoetho xy))]-[Nal]-[THP]-E-N-[3Pal]-[Sarc]-NH2
  SITE 1: note = Mod_Res - C-terminal is: ac
  SITE 1: note = misc_feature - Modified Amino Acid: dPen
  SITE 3: note = misc_feature - Modified Amino Acid: W7Me
  SITE 4: note = misc_feature - Modified Amino Acid: KAc
  SITE 5: note = misc_feature - Modified Amino Acid: Pen
  SITE 6: note = misc_feature - Modified Amino Acid: AEF
  SITE 7: note = misc_feature - Modified Amino Acid: Nal
  SITE 8: note = misc_feature - Modified Amino Acid: THP
  SITE 11: note = misc_feature - Modified Amino Acid: 3Pya
  SITE 12: note = misc_feature - Modified Amino Acid: MeGly
  SITE 12: note = Mod_Res - N-terminal is: am
  REGION 1..5: note = Disulfid - Cyclic bond: dPen to Pen
XTWKXXXXENXG

SEQ ID NO: 134 - protein, 11 aa, synthetic construct
  REGION 1..11: note = Modified peptide: Ac-C-[W(7-Me)]-[Lys(Ac)]-[Pen]-[Phe(4-(2-aminoethoxy))]-[Na l]-[THP]-E-N-[3Pal]-[Sarc]-NH2
  SITE 1: note = Mod_Res - C-terminal is: ac
  SITE 2: note = misc_feature - Modified Amino Acid: W7Me
  SITE 3: note = misc_feature - Modified Amino Acid: KAc
  SITE 4: note = misc_feature - Modified Amino Acid: Pen
  SITE 5: note = misc_feature - Modified Amino Acid: AEF
  SITE 6: note = misc_feature - Modified Amino Acid: Nal
  SITE 7: note = misc_feature - Modified Amino Acid: THP
  SITE 10: note = misc_feature - Modified Amino Acid: 3Pya
  SITE 11: note = misc_feature - Modified Amino Acid: MeGly
  SITE 11: note = Mod_Res - N-terminal is: am
  REGION 1..4: note = Disulfid - Cyclic bond: C to Pen
CWKXXXXENXG

SEQ ID NO: 135 - protein, 12 aa, synthetic construct
  REGION 1..12: note = Modified peptide: Ac-[(D)Cys]-T-[W(7-Me)]-[Lys(Ac)]-[Pen]-[Phe(4-(2-aminoetho xy))]-[Nal]-[THP]-E-N-[3Pal]-[Sarc]-NH2
  SITE 1: note = Mod_Res - C-terminal is: ac
  SITE 1: note = misc_feature - Modified Amino Acid: dC
  SITE 3: note = misc_feature - Modified Amino Acid: W7Me
  SITE 4: note = misc_feature - Modified Amino Acid: KAc
  SITE 5: note = misc_feature - Modified Amino Acid: Pen
  SITE 6: note = misc_feature - Modified Amino Acid: AEF
  SITE 7: note = misc_feature - Modified Amino Acid: Nal
  SITE 8: note = misc_feature - Modified Amino Acid: THP
  SITE 11: note = misc_feature - Modified Amino Acid: 3Pya
  SITE 12: note = misc_feature - Modified Amino Acid: MeGly
  SITE 12: note = Mod_Res - N-terminal is: am
  REGION 1..5: note = Disulfid - Cyclic bond: C to Pen
CTWKXXXXENXG

SEQ ID NO: 136 - protein, 14 aa, synthetic construct
  REGION 1..14: note = Modified peptide: Ac-[(D)arg]-[Abu]-N-T-[W(7-Me)]-Q-C-[Phe(4-(2-aminoethoxy)) ]-[Nal]-[THP]-E-S-H-[Sarc]-NH2dR
  SITE 1: note = Mod_Res - C-terminal is: ac
  SITE 1: note = misc_feature - Modified Amino Acid: dR
  SITE 2: note = misc_feature - Modified Amino Acid: Abu
  SITE 5: note = misc_feature - Modified Amino Acid: W7Me
  SITE 8: note = misc_feature - Modified Amino Acid: AEF
  SITE 9: note = misc_feature - Modified Amino Acid: Nal
  SITE 10: note = misc_feature - Modified Amino Acid: THP
  SITE 14: note = misc_feature - Modified Amino Acid: MeGly
  SITE 14: note = Mod_Res - N-terminal is: am
  REGION 2..7: note = Disulfid - Cyclic bond: Abu to C
RXNTWQCXXXESHG

SEQ ID NO: 137 - protein, 13 aa, synthetic construct
  REGION 1..13: note = Modified peptide: Ac-[Abu]-N-T-[W(7-Me)]-Q-C-[Phe(4-(2-aminoethoxy))]-[Nal]-[ THP]-E-N-H-[Sarc]-NH2
  SITE 1: note = Mod_Res - C-terminal is: ac
  SITE 1: note = misc_feature - Modified Amino Acid: Abu
  SITE 4: note = misc_feature - Modified Amino Acid: W7Me
  SITE 7: note = misc_feature - Modified Amino Acid: AEF
  SITE 8: note = misc_feature - Modified Amino Acid: Nal
  SITE 9: note = misc_feature - Modified Amino Acid: THP
  SITE 13: note = misc_feature - Modified Amino Acid: MeGly
  SITE 13: note = Mod_Res - N-terminal is: am
  REGION 1..6: note = Disulfid - Cyclic bond: Abu to C
XNTWQCXXXENHG

SEQ ID NO: 138 - protein, 12 aa, synthetic construct
  REGION 1..12: note = Modified peptide: Ac-[Pen]-N-T-[W(7-Me)]-[Lys(Ac)]-[Pen]-[Phe(4-(2-aminoethox y))]-[Nal]-[aMeLys]-[Lys(Ac)]-N-[Thiozolidine]-NH2
  SITE 1: note = Mod_Res - C-terminal is: ac
  SITE 1: note = misc_feature - Modified Amino Acid: Pen
  SITE 4: note = misc_feature - Modified Amino Acid: W7Me
  SITE 5: note = misc_feature - Modified Amino Acid: KAc
  SITE 6: note = misc_feature - Modified Amino Acid: Pen
  SITE 7: note = misc_feature - Modified Amino Acid: AEF
  SITE 8: note = misc_feature - Modified Amino Acid: Nal
  SITE 9: note = misc_feature - Modified Amino Acid: aMeK
  SITE 10: note = misc_feature - Modified Amino Acid: KAc
  SITE 12: note = misc_feature - Modified Amino Acid: Thiozolidine
  SITE 12: note = Mod_Res - N-terminal is: am
  REGION 1..6: note = Disulfid - Cyclic bond: Pen to Pen
XNTWKXXXKKNX

SEQ ID NO: 139 - protein, 12 aa, synthetic construct
  REGION 1..12: note = Modified peptide: Ac-[Pen]-N-T-[W(7-Me)]-[Lys(Ac)]-[Pen]-[Phe(4-(2-aminoethox y))]-[Nal]-[aMeLys]-[Lys(Ac)]-N-H-[MeNH]
  SITE 1: note = Mod_Res - C-terminal is: ac
  SITE 1: note = misc_feature - Modified Amino Acid: Pen
  SITE 4: note = misc_feature - Modified Amino Acid: W7Me
  SITE 5: note = misc_feature - Modified Amino Acid: KAc
  SITE 6: note = misc_feature - Modified Amino Acid: Pen
  SITE 7: note = misc_feature - Modified Amino Acid: AEF
  SITE 8: note = misc_feature - Modified Amino Acid: Nal
  SITE 9: note = misc_feature - Modified Amino Acid: aMeK
  SITE 10: note = misc_feature - Modified Amino Acid: KAc
  SITE 12: note = Mod_Res - N-terminal is: MeNH
  REGION 1..6: note = Disulfid - Cyclic bond: Pen to Pen
XNTWKXXXKKNH

SEQ ID NO: 140 - protein, 12 aa, synthetic construct
  REGION 1..12: note = Modified peptide: Ac-[Pen]-N-T-[W(7-Me)]-[Lys(Ac)]-[Pen]-[Phe(4-(2-aminoethox y))]-[Quin_3]-[aMeLys]-[Lys(Ac)]-N-H-[MeNH]
  SITE 1: note = Mod_Res - C-terminal is: ac
  SITE 1: note = misc_feature - Modified Amino Acid: Pen
  SITE 4: note = misc_feature - Modified Amino Acid: W7Me
  SITE 5: note = misc_feature - Modified Amino Acid: KAc
  SITE 6: note = misc_feature - Modified Amino Acid: Pen
  SITE 7: note = misc_feature - Modified Amino Acid: AEF
  SITE 8: note = misc_feature - Modified Amino Acid: Quin_3
  SITE 9: note = misc_feature - Modified Amino Acid: aMeK
  SITE 10: note = misc_feature - Modified Amino Acid: KAc
  SITE 12: note = Mod_Res - N-terminal is: MeNH
  REGION 1..6: note = Disulfid - Cyclic bond: Pen to Pen
XNTWKXXXKKNH

SEQ ID NO: 141 - protein, 12 aa, synthetic construct
  REGION 1..12: note = Modified peptide: Ac-[Pen]-N-T-[W(7-Me)]-[Lys(Ac)]-[Pen]-[Phe(4-(2-aminoethox y))]-[Coumarin(7-OMe)]-[aMeLys]-[Lys(Ac)]-N-[(D)Leu]-NH2
  SITE 1: note = Mod_Res - C-terminal is: ac
  SITE 1: note = misc_feature - Modified Amino Acid: Pen
  SITE 4: note = misc_feature - Modified Amino Acid: W7Me
  SITE 5: note = misc_feature - Modified Amino Acid: KAc
  SITE 6: note = misc_feature - Modified Amino Acid: Pen
  SITE 7: note = misc_feature - Modified Amino Acid: AEF
  SITE 8: note = misc_feature - Modified Amino Acid: Coumarin(7OMe)
  SITE 9: note = misc_feature - Modified Amino Acid: aMeK
  SITE 10: note = misc_feature - Modified Amino Acid: KAc
  SITE 12: note = misc_feature - Modified Amino Acid: dL
  SITE 12: note = Mod_Res - N-terminal is: am
  REGION 1..6: note = Disulfid - Cyclic bond: Pen to Pen
XNTWKXXXKKNL

SEQ ID NO: 142 - protein, 12 aa, synthetic construct
  REGION 1..12: note = Modified peptide: Ac-[Pen]-N-V-W-Q-[Pen]-[Phe(4-(2-aminoethoxy))]-[Nal]-[aMeL eu]-[Lys(Ac)]-N-N-NH2
  SITE 1: note = Mod_Res - C-terminal is: ac
  SITE 1: note = misc_feature - Modified Amino Acid: Pen
  SITE 6: note = misc_feature - Modified Amino Acid: Pen
  SITE 7: note = misc_feature - Modified Amino Acid: AEF
  SITE 8: note = misc_feature - Modified Amino Acid: Nal
  SITE 9: note = misc_feature - Modified Amino Acid: aMeLeu
  SITE 10: note = misc_feature - Modified Amino Acid: KAc
  SITE 12: note = Mod_Res - N-terminal is: am
  REGION 1..6: note = Disulfid - Cyclic bond: Pen to Pen
XNVWQXXXLKNN

SEQ ID NO: 143 - protein, 12 aa, synthetic construct
  REGION 1..12: note = Modified peptide: Ac-[Pen]-N-K-W-Q-[Pen]-[Phe(4-(2-aminoethoxy))]-[Nal]-[aMeL eu]-[Lys(Ac)]-N-N-NH2
  SITE 1: note = Mod_Res - C-terminal is: ac
  SITE 1: note = misc_feature - Modified Amino Acid: Pen
  SITE 6: note = misc_feature - Modified Amino Acid: Pen
  SITE 7: note = misc_feature - Modified Amino Acid: AEF
  SITE 8: note = misc_feature - Modified Amino Acid: Nal
  SITE 9: note = misc_feature - Modified Amino Acid: aMeLeu
  SITE 10: note = misc_feature - Modified Amino Acid: KAc
  SITE 12: note = Mod_Res - N-terminal is: am
  REGION 1..6: note = Disulfid - Cyclic bond: Pen to Pen
XNKWQXXXLKNN

SEQ ID NO: 144 - protein, 12 aa, synthetic construct
  REGION 1..12: note = Modified peptide: Ac-[Pen]-N-[Dab]-W-Q-[Pen]-[Phe(4-(2-aminoethoxy))]-[Nal]-[ aMeLeu]-[Lys(Ac)]-N-N-NH2
  SITE 1: note = Mod_Res - C-terminal is: ac
  SITE 1: note = misc_feature - Modified Amino Acid: Pen
  SITE 3: note = misc_feature - Modified Amino Acid: Dbu
  SITE 6: note = misc_feature - Modified Amino Acid: Pen
  SITE 7: note = misc_feature - Modified Amino Acid: AEF
  SITE 8: note = misc_feature - Modified Amino Acid: Nal
  SITE 9: note = misc_feature - Modified Amino Acid: aMeLeu
  SITE 10: note = misc_feature - Modified Amino Acid: KAc
  SITE 12: note = Mod_Res - N-terminal is: am
  REGION 1..6: note = Disulfid - Cyclic bond: Pen to Pen
XNXWQXXXLKNN

SEQ ID NO: 145 - protein, 12 aa, synthetic construct
  REGION 1..12: note = Modified peptide: Ac-[Pen]-N-[Dap]-W-Q-[Pen]-[Phe(4-(2-aminoethoxy))]-[Nal]-[ aMeLeu]-[Lys(Ac)]-N-N-NH2
  SITE 1: note = Mod_Res - C-terminal is: ac
  SITE 1: note = misc_feature - Modified Amino Acid: Pen
  SITE 3: note = misc_feature - Modified Amino Acid: Dpr
  SITE 6: note = misc_feature - Modified Amino Acid: Pen
  SITE 7: note = misc_feature - Modified Amino Acid: AEF
  SITE 8: note = misc_feature - Modified Amino Acid: Nal
  SITE 9: note = misc_feature - Modified Amino Acid: aMeLeu
  SITE 10: note = misc_feature - Modified Amino Acid: KAc
  SITE 12: note = Mod_Res - N-terminal is: am
  REGION 1..6: note = Disulfid - Cyclic bond: Pen to Pen
XNXWQXXXLKNN

SEQ ID NO: 146 - protein, 12 aa, synthetic construct
  REGION 1..12: note = Modified peptide: Ac-[Pen]-A-T-W-Q-[Pen]-[Phe(4-(2-aminoethoxy))]-[Nal]-[aMeL eu]-[Lys(Ac)]-N-N-NH2
  SITE 1: note = Mod_Res - C-terminal is: ac
  SITE 1: note = misc_feature - Modified Amino Acid: Pen
  SITE 6: note = misc_feature - Modified Amino Acid: Pen
  SITE 7: note = misc_feature - Modified Amino Acid: AEF
  SITE 8: note = misc_feature - Modified Amino Acid: Nal
  SITE 9: note = misc_feature - Modified Amino Acid: aMeLeu
  SITE 10: note = misc_feature - Modified Amino Acid: KAc
  SITE 12: note = Mod_Res - N-terminal is: am
  REGION 1..6: note = Disulfid - Cyclic bond: Pen to Pen
XATWQXXXLKNN

SEQ ID NO: 147 - protein, 12 aa, synthetic construct
  REGION 1..12: note = Modified peptide: Ac-[Pen]-N-A-W-Q-[Pen]-[Phe(4-(2-aminoethoxy))]-[Nal]-[aMeL eu]-[Lys(Ac)]-N-N-NH2
  SITE 1: note = Mod_Res - C-terminal is: ac
  SITE 1: note = misc_feature - Modified Amino Acid: Pen
  SITE 6: note = misc_feature - Modified Amino Acid: Pen
  SITE 7: note = misc_feature - Modified Amino Acid: AEF
  SITE 8: note = misc_feature - Modified Amino Acid: Nal
  SITE 9: note = misc_feature - Modified Amino Acid: aMeLeu
  SITE 10: note = misc_feature - Modified Amino Acid: KAc
  SITE 12: note = Mod_Res - N-terminal is: am
  REGION 1..6: note = Disulfid - Cyclic bond: Pen to Pen
XNAWQXXXLKNN

SEQ ID NO: 148 - protein, 12 aa, synthetic construct
  REGION 1..12: note = Modified peptide: Ac-[Pen]-N-T-W-A-[Pen]-[Phe(4-(2-aminoethoxy))]-[Nal]-[aMeL eu]-[Lys(Ac)]-N-N-NH2
  SITE 1: note = Mod_Res - C-terminal is: ac
  SITE 1: note = misc_feature - Modified Amino Acid: Pen
  SITE 6: note = misc_feature - Modified Amino Acid: Pen
  SITE 7: note = misc_feature - Modified Amino Acid: AEF
  SITE 8: note = misc_feature - Modified Amino Acid: Nal
  SITE 9: note = misc_feature - Modified Amino Acid: aMeLeu
  SITE 10: note = misc_feature - Modified Amino Acid: KAc
  SITE 12: note = Mod_Res - N-terminal is: am
  REGION 1..6: note = Disulfid - Cyclic bond: Pen to Pen
XNTWAXXXLKNN

SEQ ID NO: 149 - protein, 12 aa, synthetic construct
  REGION 1..12: note = Modified peptide: Ac-[Pen]-N-T-W-Q-[Pen]-[Phe(4-(2-aminoethoxy))]-[Nal]-[aMeL eu]-A-N-N-NH2
  SITE 1: note = Mod_Res - C-terminal is: ac
  SITE 1: note = misc_feature - Modified Amino Acid: Pen
  SITE 6: note = misc_feature - Modified Amino Acid: Pen
  SITE 7: note = misc_feature - Modified Amino Acid: AEF
  SITE 8: note = misc_feature - Modified Amino Acid: Nal
  SITE 9: note = misc_feature - Modified Amino Acid: aMeLeu
  SITE 12: note = Mod_Res - N-terminal is: am
  REGION 1..6: note = Disulfid - Cyclic bond: Pen to Pen
XNTWQXXXLANN

SEQ ID NO: 150 - protein, 12 aa, synthetic construct
  REGION 1..12: note = Modified peptide: Ac-[Pen]-N-T-W-Q-[Pen]-[Phe(4-(2-aminoethoxy))]-[Nal]-[aMeL eu]-[Lys(Ac)]-A-N-NH2
  SITE 1: note = Mod_Res - C-terminal is: ac
  SITE 1: note = misc_feature - Modified Amino Acid: Pen
  SITE 6: note = misc_feature - Modified Amino Acid: Pen
  SITE 7: note = misc_feature - Modified Amino Acid: AEF
  SITE 8: note = misc_feature - Modified Amino Acid: Nal
  SITE 9: note = misc_feature - Modified Amino Acid: aMeLeu
  SITE 10: note = misc_feature - Modified Amino Acid: KAc
  SITE 12: note = Mod_Res - N-terminal is: am
  REGION 1..6: note = Disulfid - Cyclic bond: Pen to Pen
XNTWQXXXLKAN

SEQ ID NO: 151 - protein, 12 aa, synthetic construct
  REGION 1..12: note = Modified peptide: Ac-[Pen]-N-T-W-Q-[Pen]-[Phe(4-(2-aminoethoxy))]-[Nal]-[aMeL eu]-[Lys(Ac)]-N-A-NH2
  SITE 1: note = Mod_Res - C-terminal is: ac
  SITE 1: note = misc_feature - Modified Amino Acid: Pen
  SITE 6: note = misc_feature - Modified Amino Acid: Pen
  SITE 7: note = misc_feature - Modified Amino Acid: AEF
  SITE 8: note = misc_feature - Modified Amino Acid: Nal
  SITE 9: note = misc_feature - Modified Amino Acid: aMeLeu
  SITE 10: note = misc_feature - Modified Amino Acid: KAc
  SITE 12: note = Mod_Res - N-terminal is: am
  REGION 1..6: note = Disulfid - Cyclic bond: Pen to Pen
XNTWQXXXLKNA

SEQ ID NO: 152 - protein, 11 aa, synthetic construct
  REGION 1..11: note = Modified peptide: Ac-[Pen]-T-W-Q-[Pen]-[Phe(4-(2-aminoethoxy))]-[Nal]-[aMeLeu ]-[Lys(Ac)]-N-N-NH2
  SITE 1: note = Mod_Res - C-terminal is: ac
  SITE 1: note = misc_feature - Modified Amino Acid: Pen
  SITE 5: note = misc_feature - Modified Amino Acid: Pen
  SITE 6: note = misc_feature - Modified Amino Acid: AEF
  SITE 7: note = misc_feature - Modified Amino Acid: Nal
  SITE 8: note = misc_feature - Modified Amino Acid: aMeLeu
  SITE 9: note = misc_feature - Modified Amino Acid: KAc
  SITE 11: note = Mod_Res - N-terminal is: am
  REGION 1..5: note = Disulfid - Cyclic bond: Pen to Pen
XTWQXXXLKNN

SEQ ID NO: 153 - protein, 10 aa, synthetic construct
  REGION 1..10: note = Modified peptide: Ac-[Pen]-N-T-W-Q-[Pen]-[Phe(4-(2-aminoethoxy))]-[Nal]-[aMeL eu]-N-NH2
  SITE 1: note = Mod_Res - C-terminal is: ac
  SITE 1: note = misc_feature - Modified Amino Acid: Pen
  SITE 6: note = misc_feature - Modified Amino Acid: Pen
  SITE 7: note = misc_feature - Modified Amino Acid: AEF
  SITE 8: note = misc_feature - Modified Amino Acid: Nal
  SITE 9: note = misc_feature - Modified Amino Acid: aMeLeu
  SITE 10: note = Mod_Res - N-terminal is: am
  REGION 1..6: note = Disulfid - Cyclic bond: Pen to Pen
XNTWQXXXLN

SEQ ID NO: 154 - protein, 9 aa, synthetic construct
  REGION 1..9: note = Modified peptide: Ac-[Pen]-N-T-W-Q-[Pen]-[Phe(4-(2-aminoethoxy))]-[Nal]-[aMeL eu]-NH2
  SITE 1: note = Mod_Res - C-terminal is: ac
  SITE 1: note = misc_feature - Modified Amino Acid: Pen
  SITE 6: note = misc_feature - Modified Amino Acid: Pen
  SITE 7: note = misc_feature - Modified Amino Acid: AEF
  SITE 8: note = misc_feature - Modified Amino Acid: Nal
  SITE 9: note = misc_feature - Modified Amino Acid: aMeLeu
  SITE 9: note = Mod_Res - N-terminal is: am
  REGION 1..6: note = Disulfid - Cyclic bond: Pen to Pen
XNTWQXXXL

SEQ ID NO: 155 - protein, 10 aa, synthetic construct
  REGION 1..10: note = Modified peptide: Ac-[Pen]-N-T-W-Q-[Pen]-[Phe(4-(2-aminoethoxy))]-[Nal]-[aMeL eu]-[Lys(Ac)]-NH2
  SITE 1: note = Mod_Res - C-terminal is: ac
  SITE 1: note = misc_feature - Modified Amino Acid: Pen
  SITE 6: note = misc_feature - Modified Amino Acid: Pen
  SITE 7: note = misc_feature - Modified Amino Acid: AEF
  SITE 8: note = misc_feature - Modified Amino Acid: Nal
  SITE 9: note = misc_feature - Modified Amino Acid: aMeLeu
  SITE 10: note = misc_feature - Modified Amino Acid: KAc
  SITE 10: note = Mod_Res - N-terminal is: am
  REGION 1..6: note = Disulfid - Cyclic bond: Pen to Pen
XNTWQXXXLK

SEQ ID NO: 156 - protein, 11 aa, synthetic construct
  REGION 1..11: note = Modified peptide: Ac-[Pen]-N-T-W-Q-[Pen]-[Phe(4-(2-aminoethoxy))]-[Nal]-[aMeL eu]-N-N-NH2
  SITE 1: note = Mod_Res - C-terminal is: ac
  SITE 1: note = misc_feature - Modified Amino Acid: Pen
  SITE 6: note = misc_feature - Modified Amino Acid: Pen
  SITE 7: note = misc_feature - Modified Amino Acid: AEF
  SITE 8: note = misc_feature - Modified Amino Acid: Nal
  SITE 9: note = misc_feature - Modified Amino Acid: aMeLeu
  SITE 11: note = Mod_Res - N-terminal is: am
  REGION 1..6: note = Disulfid - Cyclic bond: Pen to Pen
XNTWQXXXLNN

SEQ ID NO: 157 - protein, 11 aa, synthetic construct
  REGION 1..11: note = Modified peptide: Ac-[Pen]-N-T-W-Q-[Pen]-[Phe(4-(2-aminoethoxy))]-[Nal]-[aMeL eu]-[Lys(Ac)]-N-NH2
  SITE 1: note = Mod_Res - C-terminal is: ac
  SITE 1: note = misc_feature - Modified Amino Acid: Pen
  SITE 6: note = misc_feature - Modified Amino Acid: Pen
  SITE 7: note = misc_feature - Modified Amino Acid: AEF
  SITE 8: note = misc_feature - Modified Amino Acid: Nal
  SITE 9: note = misc_feature - Modified Amino Acid: aMeLeu
  SITE 10: note = misc_feature - Modified Amino Acid: KAc
  SITE 11: note = Mod_Res - N-terminal is: am
  REGION 1..6: note = Disulfid - Cyclic bond: Pen to Pen
XNTWQXXXLKN

SEQ ID NO: 158 - protein, 13 aa, synthetic construct
  REGION 1..13: note = Modified peptide: 67dR
  SITE 1: note = Mod_Res - C-terminal is: ac
  SITE 1: note = misc_feature - Modified Amino Acid: dR
  SITE 2: note = misc_feature - Modified Amino Acid: Abu
  SITE 8: note = misc_feature - Modified Amino Acid: AEF
  SITE 9: note = misc_feature - Modified Amino Acid: 2Nal
  SITE 10: note = misc_feature - Modified Amino Acid: THP
  SITE 13: note = Mod_Res - N-terminal is: am
  REGION 2..7: note = Disulfid - Cyclic bond: Abu to C
RXQTWQCXXXENF

SEQ ID NO: 159 - protein, 13 aa, synthetic construct
  REGION 1..13: note = Modified peptide: 107dR
  SITE 1: note = Mod_Res - C-terminal is: EtCO
  SITE 1: note = misc_feature - Modified Amino Acid: dR
  SITE 7: note = misc_feature - Modified Amino Acid: Pen
  SITE 8: note = misc_feature - Modified Amino Acid: AEF
  SITE 9: note = misc_feature - Modified Amino Acid: 2Nal
  SITE 10: note = misc_feature - Modified Amino Acid: THP
  SITE 13: note = misc_feature - Modified Amino Acid: aMePhe
  SITE 13: note = Mod_Res - N-terminal is: am
  REGION 2..7: note = Disulfid - Cyclic bond: C to Pen
RCQTWQXXXXENF

SEQ ID NO: 160 - protein, 13 aa, synthetic construct
  REGION 1..13: note = Modified peptide: 108dR
  SITE 1: note = Mod_Res - C-terminal is: EtCO
  SITE 1: note = misc_feature - Modified Amino Acid: dR
  SITE 2: note = misc_feature - Modified Amino Acid: Pen
  SITE 7: note = misc_feature - Modified Amino Acid: Pen
  SITE 8: note = misc_feature - Modified Amino Acid: AEF
  SITE 9: note = misc_feature - Modified Amino Acid: 2Nal
  SITE 10: note = misc_feature - Modified Amino Acid: THP
  SITE 13: note = misc_feature - Modified Amino Acid: aMePhe
  SITE 13: note = Mod_Res - N-terminal is: am
  REGION 2..7: note = Disulfid - Cyclic bond: Pen to Pen
RXQTWQXXXXENF

SEQ ID NO: 161 - protein, 13 aa, synthetic construct
  REGION 1..13: note = Modified peptide: 128dR
  SITE 1: note = Mod_Res - C-terminal is: EtCO
  SITE 1: note = misc_feature - Modified Amino Acid: dR
  SITE 2: note = misc_feature - Modified Amino Acid: Pen
  SITE 7: note = misc_feature - Modified Amino Acid: Pen
  SITE 8: note = misc_feature - Modified Amino Acid: AEF
  SITE 9: note = misc_feature - Modified Amino Acid: 2Nal
  SITE 10: note = misc_feature - Modified Amino Acid: THP
  SITE 13: note = Mod_Res - N-terminal is: am
  REGION 2..7: note = Disulfid - Cyclic bond: Pen to Pen
RXQTWQXXXXKNF

SEQ ID NO: 162 - protein, 13 aa, synthetic construct
  REGION 1..13: note = Modified peptide: 134dR
  SITE 1: note = Mod_Res - C-terminal is: ac
  SITE 1: note = misc_feature - Modified Amino Acid: dR
  SITE 2: note = misc_feature - Modified Amino Acid: Abu
  SITE 8: note = misc_feature - Modified Amino Acid: AEF
  SITE 9: note = misc_feature - Modified Amino Acid: 2Nal
  SITE 10: note = misc_feature - Modified Amino Acid: Achx
  SITE 11: note = misc_feature - Modified Amino Acid: aMeE
  SITE 13: note = Mod_Res - N-terminal is: am
  REGION 2..7: note = Disulfid - Cyclic bond: Abu to C
RXQTWQCXXXENF

SEQ ID NO: 163 - protein, 14 aa, synthetic construct
  REGION 1..14: note = Modified peptide: 135dR
  SITE 1: note = Mod_Res - C-terminal is: ac
  SITE 1: note = misc_feature - Modified Amino Acid: dR
  SITE 2: note = misc_feature - Modified Amino Acid: Abu
  SITE 8: note = misc_feature - Modified Amino Acid: AEF
  SITE 9: note = misc_feature - Modified Amino Acid: 2Nal
  SITE 10: note = misc_feature - Modified Amino Acid: Achx
  SITE 11: note = misc_feature - Modified Amino Acid: aMeE
  SITE 14: note = misc_feature - Modified Amino Acid: AIB
  SITE 14: note = Mod_Res - N-terminal is: am
  REGION 2..7: note = Disulfid - Cyclic bond: Abu to C
RXQTWQCXXXENFX

SEQ ID NO: 164 - protein, 13 aa, synthetic construct
  REGION 1..13: note = Modified peptide: 136dR
  SITE 1: note = Mod_Res - C-terminal is: ac
  SITE 1: note = misc_feature - Modified Amino Acid: dR
  SITE 2: note = misc_feature - Modified Amino Acid: Abu
  SITE 8: note = misc_feature - Modified Amino Acid: AEF
  SITE 9: note = misc_feature - Modified Amino Acid: 2Nal
  SITE 10: note = misc_feature - Modified Amino Acid: Achx
  SITE 11: note = misc_feature - Modified Amino Acid: aMeE
  SITE 13: note = misc_feature - Modified Amino Acid: aMeF
  SITE 13: note = Mod_Res - N-terminal is: am
  REGION 2..7: note = Disulfid - Cyclic bond: Abu to C
RXQTWQCXXXENF

SEQ ID NO: 165 - protein, 13 aa, synthetic construct
  REGION 1..13: note = Modified peptide: 137dR
  SITE 1: note = Mod_Res - C-terminal is: ac
  SITE 1: note = misc_feature - Modified Amino Acid: dR
  SITE 2: note = misc_feature - Modified Amino Acid: Abu
  SITE 8: note = misc_feature - Modified Amino Acid: AEF
  SITE 9: note = misc_feature - Modified Amino Acid: 2Nal
  SITE 10: note = misc_feature - Modified Amino Acid: THP
  SITE 13: note = misc_feature - Modified Amino Acid: aMeF
  SITE 13: note = Mod_Res - N-terminal is: am
  REGION 2..7: note = Disulfid - Cyclic bond: Abu to C
RXQTWQCXXXQNF

SEQ ID NO: 166 - protein, 13 aa, synthetic construct
  REGION 1..13: note = Modified peptide: 138dR
  SITE 1: note = Mod_Res - C-terminal is: ac
  SITE 1: note = misc_feature - Modified Amino Acid: dR
  SITE 2: note = misc_feature - Modified Amino Acid: Abu
  SITE 8: note = misc_feature - Modified Amino Acid: AEF
  SITE 9: note = misc_feature - Modified Amino Acid: 2Nal
  SITE 10: note = misc_feature - Modified Amino Acid: THP
  SITE 11: note = misc_feature - Modified Amino Acid: aMeE
  SITE 13: note = misc_feature - Modified Amino Acid: aMeW
  SITE 13: note = Mod_Res - N-terminal is: am
  REGION 2..7: note = Disulfid - Cyclic bond: Abu to C
RXQTWQCXXXENW

SEQ ID NO: 167 - protein, 13 aa, synthetic construct
  REGION 1..13: note = Modified peptide: 139dR
  SITE 1: note = Mod_Res - C-terminal is: ac
  SITE 1: note = misc_feature - Modified Amino Acid: dR
  SITE 2: note = misc_feature - Modified Amino Acid: Abu
  SITE 8: note = misc_feature - Modified Amino Acid: AEF
  SITE 9: note = misc_feature - Modified Amino Acid: 2Nal
  SITE 10: note = misc_feature - Modified Amino Acid: THP
  SITE 11: note = misc_feature - Modified Amino Acid: aMeE
  SITE 13: note = misc_feature - Modified Amino Acid: 1Nal
  SITE 13: note = Mod_Res - N-terminal is: am
  REGION 2..7: note = Disulfid - Cyclic bond: Abu to C
RXQTWQCXXXENX

SEQ ID NO: 168 - protein, 13 aa, synthetic construct
  REGION 1..13: note = Modified peptide: 141dR
  SITE 1: note = Mod_Res - C-terminal is: EtCO
  SITE 1: note = misc_feature - Modified Amino Acid: dR
  SITE 2: note = misc_feature - Modified Amino Acid: Pen
  SITE 7: note = misc_feature - Modified Amino Acid: Pen
  SITE 8: note = misc_feature - Modified Amino Acid: AEF
  SITE 9: note = misc_feature - Modified Amino Acid: 2Nal
  SITE 10: note = misc_feature - Modified Amino Acid: THP
  SITE 13: note = Mod_Res - N-terminal is: am
  REGION 2..7: note = Disulfid - Cyclic bond: Pen to Pen
RXQTWQXXXXKNF

SEQ ID NO: 169 - protein, 13 aa, synthetic construct
  REGION 1..13: note = Modified peptide: 142dR
  SITE 1: note = Mod_Res - C-terminal is: ac
  SITE 1: note = misc_feature - Modified Amino Acid: dR
  SITE 2: note = misc_feature - Modified Amino Acid: Abu
  SITE 8: note = misc_feature - Modified Amino Acid: AEF
  SITE 9: note = misc_feature - Modified Amino Acid: 2Nal
  SITE 10: note = misc_feature - Modified Amino Acid: THP
  SITE 11: note = misc_feature - Modified Amino Acid: aMeE
  SITE 13: note = misc_feature - Modified Amino Acid: 4AmPhe
  SITE 13: note = Mod_Res - N-terminal is: am
  REGION 2..7: note = Disulfid - Cyclic bond: Abu to C
RXQTWQCXXXENX

SEQ ID NO: 170 - protein, 13 aa, synthetic construct
  REGION 1..13: note = Modified peptide: 143dR
  SITE 1: note = Mod_Res - C-terminal is: ac
  SITE 1: note = misc_feature - Modified Amino Acid: dR
  SITE 2: note = misc_feature - Modified Amino Acid: Abu
  SITE 8: note = misc_feature - Modified Amino Acid: AEF
  SITE 9: note = misc_feature - Modified Amino Acid: 2Nal
  SITE 10: note = misc_feature - Modified Amino Acid: THP
  SITE 11: note = misc_feature - Modified Amino Acid: aMeE
  SITE 13: note = misc_feature - Modified Amino Acid: 2Nal
  SITE 13: note = Mod_Res - N-terminal is: am
  REGION 2..7: note = Disulfid - Cyclic bond: Abu to C
RXQTWQCXXXENX

SEQ ID NO: 171 - protein, 13 aa, synthetic construct
  REGION 1..13: note = Modified peptide: 144dR
  SITE 1: note = Mod_Res - C-terminal is: ac
  SITE 1: note = misc_feature - Modified Amino Acid: dR
  SITE 2: note = misc_feature - Modified Amino Acid: Abu
  SITE 8: note = misc_feature - Modified Amino Acid: AEF
  SITE 9: note = misc_feature - Modified Amino Acid: 2Nal
  SITE 10: note = misc_feature - Modified Amino Acid: THP
  SITE 11: note = misc_feature - Modified Amino Acid: aMeE
  SITE 13: note = misc_feature - Modified Amino Acid: aMeFPhe
  SITE 13: note = Mod_Res - N-terminal is: am
  REGION 2..7: note = Disulfid - Cyclic bond: Abu to C
RXQTWQCXXXENF

SEQ ID NO: 172 - protein, 13 aa, synthetic construct
  REGION 1..13: note = Modified peptide: 148dR
  SITE 1: note = Mod_Res - C-terminal is: ac
  SITE 1: note = misc_feature - Modified Amino Acid: dR
  SITE 7: note = misc_feature - Modified Amino Acid: Pen
  SITE 8: note = misc_feature - Modified Amino Acid: AEF
  SITE 9: note = misc_feature - Modified Amino Acid: 2Nal
  SITE 10: note = misc_feature - Modified Amino Acid: Achx
  SITE 11: note = misc_feature - Modified Amino Acid: aMeE
  SITE 13: note = misc_feature - Modified Amino Acid: aMePhe
  SITE 13: note = Mod_Res - N-terminal is: am
  REGION 2..7: note = Disulfid - Cyclic bond: C to Pen
RCQTWQXXXXENF

SEQ ID NO: 173 - protein, 13 aa, synthetic construct
  REGION 1..13: note = Modified peptide: 149dR
  SITE 1: note = Mod_Res - C-terminal is: ac
  SITE 1: note = misc_feature - Modified Amino Acid: dR
  SITE 2: note = misc_feature - Modified Amino Acid: Abu
  SITE 8: note = misc_feature - Modified Amino Acid: LY02
  SITE 9: note = misc_feature - Modified Amino Acid: 2Nal
  SITE 10: note = misc_feature - Modified Amino Acid: THP
  SITE 11: note = misc_feature - Modified Amino Acid: aMeE
  SITE 13: note = misc_feature - Modified Amino Acid: aMePhe
  SITE 13: note = Mod_Res - N-terminal is: am
  REGION 2..7: note = Disulfid - Cyclic bond: Abu to C
RXQTWQCXXXENF

SEQ ID NO: 174 - protein, 15 aa, synthetic construct
  REGION 1..15: note = Modified peptide: 153dR
  SITE 1: note = Mod_Res - C-terminal is: ac
  SITE 1: note = misc_feature - Modified Amino Acid: dR
  SITE 2: note = misc_feature - Modified Amino Acid: Abu
  SITE 8: note = misc_feature - Modified Amino Acid: AEF
  SITE 9: note = misc_feature - Modified Amino Acid: 2Nal
  SITE 10: note = misc_feature - Modified Amino Acid: THP
  SITE 11: note = misc_feature - Modified Amino Acid: aMeE
  SITE 14: note = misc_feature - Modified Amino Acid: AIB
  SITE 15: note = misc_feature - Modified Amino Acid: aMeK
  SITE 15: note = Mod_Res - N-terminal is: am
  REGION 2..7: note = Disulfid - Cyclic bond: Abu to C
RXQTWQCXXXENFXK

SEQ ID NO: 175 - protein, 13 aa, synthetic construct
  REGION 1..13: note = Modified peptide: 155dR
  SITE 1: note = Mod_Res - C-terminal is: ac
  SITE 1: note = misc_feature - Modified Amino Acid: dR
  SITE 2: note = misc_feature - Modified Amino Acid: Abu
  SITE 8: note = misc_feature - Modified Amino Acid: AEF
  SITE 9: note = misc_feature - Modified Amino Acid: 2Nal
  SITE 10: note = misc_feature - Modified Amino Acid: THP
  SITE 11: note = misc_feature - Modified Amino Acid: AIB
  SITE 13: note = Mod_Res - N-terminal is: am
  REGION 2..7: note = Disulfid - Cyclic bond: Abu to C
RXQTWQCXXXXNF

SEQ ID NO: 176 - protein, 15 aa, synthetic construct
  REGION 1..15: note = Modified peptide: 157dR
  SITE 1: note = Mod_Res - C-terminal is: ac
  SITE 1: note = misc_feature - Modified Amino Acid: dR
  SITE 2: note = misc_feature - Modified Amino Acid: Abu
  SITE 8: note = misc_feature - Modified Amino Acid: AEF
  SITE 9: note = misc_feature - Modified Amino Acid: 2Nal
  SITE 10: note = misc_feature - Modified Amino Acid: Achx
  SITE 11: note = misc_feature - Modified Amino Acid: aMeE
  SITE 14: note = misc_feature - Modified Amino Acid: AIB
  SITE 15: note = misc_feature - Modified Amino Acid: aMeK
  SITE 15: note = Mod_Res - N-terminal is: am
  REGION 2..7: note = Disulfid - Cyclic bond: Abu to C
RXQTWQCXXXENFXK

SEQ ID NO: 177 - protein, 13 aa, synthetic construct
  REGION 1..13: note = Modified peptide: 160dR
  SITE 1: note = Mod_Res - C-terminal is: ac
  SITE 1: note = misc_feature - Modified Amino Acid: dR
  SITE 2: note = misc_feature - Modified Amino Acid: Abu
  SITE 8: note = misc_feature - Modified Amino Acid: AEF
  SITE 9: note = misc_feature - Modified Amino Acid: 2Nal
  SITE 10: note = misc_feature - Modified Amino Acid: THP
  SITE 11: note = misc_feature - Modified Amino Acid: aMeE
  SITE 13: note = misc_feature - Modified Amino Acid: "34diFPhe"
  SITE 13: note = Mod_Res - N-terminal is: am
  REGION 2..7: note = Disulfid - Cyclic bond: Abu to C
RXQTWQCXXXENX

SEQ ID NO: 178 - protein, 13 aa, synthetic construct
  REGION 1..13: note = Modified peptide: 163dR
  SITE 1: note = Mod_Res - C-terminal is: ac
  SITE 1: note = misc_feature - Modified Amino Acid: dR
  SITE 2: note = misc_feature - Modified Amino Acid: Abu
  SITE 8: note = misc_feature - Modified Amino Acid: AEF
  SITE 9: note = misc_feature - Modified Amino Acid: 2Nal
  SITE 10: note = misc_feature - Modified Amino Acid: THP
  SITE 11: note = misc_feature - Modified Amino Acid: Achx
  SITE 13: note = misc_feature - Modified Amino Acid: aMePhe
  SITE 13: note = Mod_Res - N-terminal is: am
  REGION 2..7: note = Disulfid - Cyclic bond: Abu to C
RXQTWQCXXXXNF

SEQ ID NO: 179 - protein, 13 aa, synthetic construct
  REGION 1..13: note = Modified peptide: 166dR
  SITE 1: note = Mod_Res - C-terminal is: ac
  SITE 1: note = misc_feature - Modified Amino Acid: dR
  SITE 2: note = misc_feature - Modified Amino Acid: Pen
  SITE 7: note = misc_feature - Modified Amino Acid: Pen
  SITE 8: note = misc_feature - Modified Amino Acid: AEF
  SITE 9: note = misc_feature - Modified Amino Acid: 2Nal
  SITE 10: note = misc_feature - Modified Amino Acid: THP
  SITE 13: note = Mod_Res - N-terminal is: am
  REGION 2..7: note = Disulfid - Cyclic bond: Pen to Pen
RXQTWQXXXXKNF

SEQ ID NO: 180 - protein, 13 aa, synthetic construct
  REGION 1..13: note = Modified peptide: 167dR
  SITE 1: note = Mod_Res - C-terminal is: ac
  SITE 1: note = misc_feature - Modified Amino Acid: dR
  SITE 2: note = misc_feature - Modified Amino Acid: Pen
  SITE 7: note = misc_feature - Modified Amino Acid: Pen
  SITE 8: note = misc_feature - Modified Amino Acid: AEF
  SITE 9: note = misc_feature - Modified Amino Acid: 2Nal
  SITE 10: note = misc_feature - Modified Amino Acid: THP
  SITE 13: note = Mod_Res - N-terminal is: am
  REGION 2..7: note = Disulfid - Cyclic bond: Pen to Pen
RXQTWQXXXXKNF

SEQ ID NO: 181 - protein, 13 aa, synthetic construct
  REGION 1..13: note = Modified peptide: 168dR
  SITE 1: note = Mod_Res - C-terminal is: ac
  SITE 1: note = misc_feature - Modified Amino Acid: dR
  SITE 2: note = misc_feature - Modified Amino Acid: Pen
  SITE 7: note = misc_feature - Modified Amino Acid: Pen
  SITE 8: note = misc_feature - Modified Amino Acid: AEF
  SITE 9: note = misc_feature - Modified Amino Acid: 2Nal
  SITE 10: note = misc_feature - Modified Amino Acid: THP
  SITE 13: note = Mod_Res - N-terminal is: am
  REGION 2..7: note = Disulfid - Cyclic bond: Pen to Pen
RXQTWQXXXXKNF

SEQ ID NO: 182 - protein, 13 aa, synthetic construct
  REGION 1..13: note = Modified peptide: 173dR
  SITE 1: note = Mod_Res - C-terminal is: ac
  SITE 1: note = misc_feature - Modified Amino Acid: dR
  SITE 2: note = misc_feature - Modified Amino Acid: Pen
  SITE 7: note = misc_feature - Modified Amino Acid: Pen
  SITE 8: note = misc_feature - Modified Amino Acid: AEF
  SITE 9: note = misc_feature - Modified Amino Acid: 2Nal
  SITE 10: note = misc_feature - Modified Amino Acid: THP
  SITE 13: note = Mod_Res - N-terminal is: am
  REGION 2..7: note = Disulfid - Cyclic bond: Pen to Pen
RXQTWQXXXXKNF

SEQ ID NO: 183 - protein, 13 aa, synthetic construct
  REGION 1..13: note = Modified peptide: 174dR
  SITE 1: note = Mod_Res - C-terminal is: ac
  SITE 1: note = misc_feature - Modified Amino Acid: dR
  SITE 2: note = misc_feature - Modified Amino Acid: Pen
  SITE 7: note = misc_feature - Modified Amino Acid: Pen
  SITE 8: note = misc_feature - Modified Amino Acid: AEF
  SITE 9: note = misc_feature - Modified Amino Acid: 2Nal
  SITE 10: note = misc_feature - Modified Amino Acid: THP
  SITE 13: note = Mod_Res - N-terminal is: am
  REGION 2..7: note = Disulfid - Cyclic bond: Pen to Pen
RXQTWQXXXXKNF

SEQ ID NO: 184 - protein, 13 aa, synthetic construct
  REGION 1..13: note = Modified peptide: 175dR
  SITE 1: note = Mod_Res - C-terminal is: ac
  SITE 1: note = misc_feature - Modified Amino Acid: dR
  SITE 2: note = misc_feature - Modified Amino Acid: Pen
  SITE 7: note = misc_feature - Modified Amino Acid: Pen
  SITE 8: note = misc_feature - Modified Amino Acid: AEF
  SITE 9: note = misc_feature - Modified Amino Acid: 2Nal
  SITE 10: note = misc_feature - Modified Amino Acid: THP
  SITE 13: note = Mod_Res - N-terminal is: am
  REGION 2..7: note = Disulfid - Cyclic bond: Pen to Pen
RXQTWQXXXXKNF

SEQ ID NO: 185 - protein, 13 aa, synthetic construct
  REGION 1..13: note = Modified peptide: 176dR
  SITE 1: note = Mod_Res - C-terminal is: ac
  SITE 1: note = misc_feature - Modified Amino Acid: dR
  SITE 2: note = misc_feature - Modified Amino Acid: Pen
  SITE 7: note = misc_feature - Modified Amino Acid: Pen
  SITE 8: note = misc_feature - Modified Amino Acid: AEF
  SITE 9: note = misc_feature - Modified Amino Acid: 2Nal
  SITE 10: note = misc_feature - Modified Amino Acid: THP
  SITE 13: note = Mod_Res - N-terminal is: am
  REGION 2..7: note = Disulfid - Cyclic bond: Pen to Pen
RXQTWQXXXXKNF

SEQ ID NO: 186 - protein, 13 aa, synthetic construct
  REGION 1..13: note = Modified peptide: 197dR
  SITE 1: note = Mod_Res - C-terminal is: ac
  SITE 1: note = misc_feature - Modified Amino Acid: dR
  SITE 2: note = misc_feature - Modified Amino Acid: Abu
  SITE 8: note = misc_feature - Modified Amino Acid: AEF
  SITE 9: note = misc_feature - Modified Amino Acid: 2Nal
  SITE 10: note = misc_feature - Modified Amino Acid: THP
  SITE 11: note = misc_feature - Modified Amino Acid: aMeE
  SITE 13: note = misc_feature - Modified Amino Acid: DY02
  SITE 13: note = Mod_Res - N-terminal is: am
  REGION 2..7: note = Disulfid - Cyclic bond: Abu to C
RXQTWQCXXXENX

SEQ ID NO: 187 - protein, 13 aa, synthetic construct
  REGION 1..13: note = Modified peptide: 199dR
  SITE 1: note = Mod_Res - C-terminal is: ac
  SITE 1: note = misc_feature - Modified Amino Acid: dR
  SITE 2: note = misc_feature - Modified Amino Acid: Abu
  SITE 8: note = misc_feature - Modified Amino Acid: AEF
  SITE 9: note = misc_feature - Modified Amino Acid: 2Nal
  SITE 10: note = misc_feature - Modified Amino Acid: THP
  SITE 11: note = misc_feature - Modified Amino Acid: aMeE
  SITE 13: note = misc_feature - Modified Amino Acid: 5FW
  SITE 13: note = Mod_Res - N-terminal is: am
  REGION 2..7: note = Disulfid - Cyclic bond: Abu to C
RXQTWQCXXXENX

SEQ ID NO: 188 - protein, 12 aa, synthetic construct
  REGION 1..12: note = Modified peptide: 202
  SITE 1: note = Mod_Res - C-terminal is: ac
  SITE 1: note = misc_feature - Modified Amino Acid: Pen
  SITE 5: note = misc_feature - Modified Amino Acid: KAc
  SITE 6: note = misc_feature - Modified Amino Acid: Pen
  SITE 7: note = misc_feature - Modified Amino Acid: AEF
  SITE 8: note = misc_feature - Modified Amino Acid: 2Nal
  SITE 9: note = misc_feature - Modified Amino Acid: aMeK
  SITE 10: note = misc_feature - Modified Amino Acid: KAc
  SITE 12: note = misc_feature - Modified Amino Acid: aMePhe
  SITE 12: note = Mod_Res - N-terminal is: am
  REGION 1..6: note = Disulfid - Cyclic bond: Pen to Pen
XQTWKXXXKKNF

SEQ ID NO: 189 - protein, 13 aa, synthetic construct
  REGION 1..13: note = Modified peptide: 207dR
  SITE 1: note = Mod_Res - C-terminal is: EtCO
  SITE 1: note = misc_feature - Modified Amino Acid: dR
  SITE 2: note = misc_feature - Modified Amino Acid: Abu
  SITE 8: note = misc_feature - Modified Amino Acid: AEF
  SITE 9: note = misc_feature - Modified Amino Acid: 2Nal
  SITE 10: note = misc_feature - Modified Amino Acid: THP
  SITE 13: note = misc_feature - Modified Amino Acid: aMePhe
  SITE 13: note = Mod_Res - N-terminal is: am
  REGION 2..7: note = Disulfid - Cyclic bond: Abu to C
RXQTWQCXXXENF

SEQ ID NO: 190 - protein, 13 aa, synthetic construct
  REGION 1..13: note = Modified peptide: 208dR
  SITE 1: note = Mod_Res - C-terminal is: ac
  SITE 1: note = misc_feature - Modified Amino Acid: dR
  SITE 2: note = misc_feature - Modified Amino Acid: Abu
  SITE 8: note = misc_feature - Modified Amino Acid: AEF
  SITE 9: note = misc_feature - Modified Amino Acid: 2Nal
  SITE 10: note = misc_feature - Modified Amino Acid: THP
  SITE 11: note = misc_feature - Modified Amino Acid: aMeE
  SITE 13: note = Mod_Res - N-terminal is: am
  REGION 2..7: note = Disulfid - Cyclic bond: Abu to C
RXQTWQCXXXENH

SEQ ID NO: 191 - protein, 13 aa, synthetic construct
  REGION 1..13: note = Modified peptide: 222dR
  SITE 1: note = Mod_Res - C-terminal is: EtCO
  SITE 1: note = misc_feature - Modified Amino Acid: dR
  SITE 2: note = misc_feature - Modified Amino Acid: aG
  SITE 7: note = misc_feature - Modified Amino Acid: aG
  SITE 8: note = misc_feature - Modified Amino Acid: AEF
  SITE 9: note = misc_feature - Modified Amino Acid: 2Nal
  SITE 10: note = misc_feature - Modified Amino Acid: THP
  SITE 13: note = misc_feature - Modified Amino Acid: aMePhe
  SITE 13: note = Mod_Res - N-terminal is: am
  REGION 2..7: note = Disulfid - Cyclic bond: aG to G
RXQTWQGXXXENF

SEQ ID NO: 192 - protein, 12 aa, synthetic construct
  REGION 1..12: note = Modified peptide: 223
  SITE 1: note = Mod_Res - C-terminal is: ac
  SITE 1: note = misc_feature - Modified Amino Acid: Pen
  SITE 4: note = misc_feature - Modified Amino Acid: 7MeW
  SITE 6: note = misc_feature - Modified Amino Acid: Pen
  SITE 7: note = misc_feature - Modified Amino Acid: AEF
  SITE 8: note = misc_feature - Modified Amino Acid: 2Nal
  SITE 9: note = misc_feature - Modified Amino Acid: aMeK
  SITE 10: note = misc_feature - Modified Amino Acid: KAc
  SITE 12: note = misc_feature - Modified Amino Acid: aMePhe
  SITE 12: note = Mod_Res - N-terminal is: am
  REGION 1..6: note = Disulfid - Cyclic bond: Pen to Pen
XNTWQXXXKKNF

SEQ ID NO: 193 - protein, 12 aa, synthetic construct
  REGION 1..12: note = Modified peptide: 224
  SITE 1: note = Mod_Res - C-terminal is: ac
  SITE 1: note = misc_feature - Modified Amino Acid: Pen
  SITE 4: note = misc_feature - Modified Amino Acid: 7MeW
  SITE 5: note = misc_feature - Modified Amino Acid: KAc
  SITE 6: note = misc_feature - Modified Amino Acid: Pen
  SITE 7: note = misc_feature - Modified Amino Acid: AEF
  SITE 8: note = misc_feature - Modified Amino Acid: 2Nal
  SITE 9: note = misc_feature - Modified Amino Acid: aMeK
  SITE 10: note = misc_feature - Modified Amino Acid: KAc
  SITE 12: note = misc_feature - Modified Amino Acid: aMePhe
  SITE 12: note = Mod_Res - N-terminal is: am
  REGION 1..6: note = Disulfid - Cyclic bond: Pen to Pen
XNTWKXXXKKNF

SEQ ID NO: 194 - protein, 13 aa, synthetic construct
  REGION 1..13: note = Modified peptide: 229dR
  SITE 1: note = Mod_Res - C-terminal is: ac
  SITE 1: note = misc_feature - Modified Amino Acid: dR
  SITE 2: note = misc_feature - Modified Amino Acid: Pen
  SITE 5: note = misc_feature - Modified Amino Acid: 7MeW
  SITE 7: note = misc_feature - Modified Amino Acid: Pen
  SITE 8: note = misc_feature - Modified Amino Acid: AEF
  SITE 9: note = misc_feature - Modified Amino Acid: 2Nal
  SITE 10: note = misc_feature - Modified Amino Acid: THP
  SITE 13: note = misc_feature - Modified Amino Acid: aMePhe
  SITE 13: note = Mod_Res - N-terminal is: am
  REGION 2..7: note = Disulfid - Cyclic bond: Pen to Pen
RXNTWQXXXXENF

SEQ ID NO: 195 - protein, 13 aa, synthetic construct
  REGION 1..13: note = Modified peptide: 233dR
  SITE 1: note = Mod_Res - C-terminal is: ac
  SITE 1: note = misc_feature - Modified Amino Acid: dR
  SITE 2: note = misc_feature - Modified Amino Acid: Pen
  SITE 5: note = misc_feature - Modified Amino Acid: 7MeW
  SITE 6: note = misc_feature - Modified Amino Acid: KAc
  SITE 7: note = misc_feature - Modified Amino Acid: Pen
  SITE 8: note = misc_feature - Modified Amino Acid: AEF
  SITE 9: note = misc_feature - Modified Amino Acid: 2Nal
  SITE 10: note = misc_feature - Modified Amino Acid: THP
  SITE 13: note = misc_feature - Modified Amino Acid: aMePhe
  SITE 13: note = Mod_Res - N-terminal is: am
  REGION 2..7: note = Disulfid - Cyclic bond: Pen to Pen
RXNTWKXXXXENF

SEQ ID NO: 196 - protein, 13 aa, synthetic construct
  REGION 1..13: note = Modified peptide: 235dR
  SITE 1: note = Mod_Res - C-terminal is: ac
  SITE 1: note = misc_feature - Modified Amino Acid: dR
  SITE 2: note = misc_feature - Modified Amino Acid: Pen
  SITE 5: note = misc_feature - Modified Amino Acid: 7MeW
  SITE 7: note = misc_feature - Modified Amino Acid: Pen
  SITE 8: note = misc_feature - Modified Amino Acid: AEF
  SITE 9: note = misc_feature - Modified Amino Acid: 2Nal
  SITE 10: note = misc_feature - Modified Amino Acid: Acpx
  SITE 13: note = misc_feature - Modified Amino Acid: aMePhe
  SITE 13: note = Mod_Res - N-terminal is: am
  REGION 2..7: note = Disulfid - Cyclic bond: Pen to Pen
RXNTWQXXXXENF

SEQ ID NO: 197 - protein, 13 aa, synthetic construct
  REGION 1..13: note = Modified peptide: 236dR
  SITE 1: note = Mod_Res - C-terminal is: ac
  SITE 1: note = misc_feature - Modified Amino Acid: dR
  SITE 2: note = misc_feature - Modified Amino Acid: Pen
  SITE 5: note = misc_feature - Modified Amino Acid: 7MeW
  SITE 6: note = misc_feature - Modified Amino Acid: KAc
  SITE 7: note = misc_feature - Modified Amino Acid: Pen
  SITE 8: note = misc_feature - Modified Amino Acid: AEF
  SITE 9: note = misc_feature - Modified Amino Acid: 2Nal
  SITE 10: note = misc_feature - Modified Amino Acid: Acpx
  SITE 13: note = misc_feature - Modified Amino Acid: aMePhe
  SITE 13: note = Mod_Res - N-terminal is: am
  REGION 2..7: note = Disulfid - Cyclic bond: Pen to Pen
RXNTWKXXXXENF

SEQ ID NO: 198 - protein, 13 aa, synthetic construct
  REGION 1..13: note = Modified peptide: 238dR
  SITE 1: note = Mod_Res - C-terminal is: ac
  SITE 1: note = misc_feature - Modified Amino Acid: dR
  SITE 2: note = misc_feature - Modified Amino Acid: Pen
  SITE 5: note = misc_feature - Modified Amino Acid: bMeW(2S3R)
  SITE 6: note = misc_feature - Modified Amino Acid: KAc
  SITE 7: note = misc_feature - Modified Amino Acid: Pen
  SITE 8: note = misc_feature - Modified Amino Acid: AEF
  SITE 9: note = misc_feature - Modified Amino Acid: 2Nal
  SITE 10: note = misc_feature - Modified Amino Acid: THP
  SITE 13: note = misc_feature - Modified Amino Acid: aMePhe
  SITE 13: note = Mod_Res - N-terminal is: am
  REGION 2..7: note = Disulfid - Cyclic bond: Pen to Pen
RXNTXKXXXXENF

SEQ ID NO: 199 - protein, 13 aa, synthetic construct
  REGION 1..13: note = Modified peptide: 239dR
  SITE 1: note = Mod_Res - C-terminal is: ac
  SITE 1: note = misc_feature - Modified Amino Acid: dR
  SITE 2: note = misc_feature - Modified Amino Acid: Pen
  SITE 7: note = misc_feature - Modified Amino Acid: Pen
  SITE 8: note = misc_feature - Modified Amino Acid: AEF
  SITE 9: note = misc_feature - Modified Amino Acid: 2Nal
  SITE 10: note = misc_feature - Modified Amino Acid: THP
  SITE 13: note = misc_feature - Modified Amino Acid: aMePhe
  SITE 13: note = Mod_Res - N-terminal is: am
  REGION 2..7: note = Disulfid - Cyclic bond: Pen to Pen
RXQTWQXXXXENF

SEQ ID NO: 200 - protein, 12 aa, synthetic construct
  REGION 1..12: note = Modified peptide: 240
  SITE 1: note = Mod_Res - C-terminal is: ac
  SITE 1: note = misc_feature - Modified Amino Acid: Pen
  SITE 5: note = misc_feature - Modified Amino Acid: KAc
  SITE 6: note = misc_feature - Modified Amino Acid: Pen
  SITE 7: note = misc_feature - Modified Amino Acid: AEF
  SITE 8: note = misc_feature - Modified Amino Acid: 2Nal
  SITE 9: note = misc_feature - Modified Amino Acid: aMeK
  SITE 10: note = misc_feature - Modified Amino Acid: KAc
  SITE 12: note = misc_feature - Modified Amino Acid: aMePhe
  SITE 12: note = Mod_Res - N-terminal is: am
  REGION 1..6: note = Disulfid - Cyclic bond: Pen to Pen
XNTWKXXXKKNF

SEQ ID NO: 201 - protein, 13 aa, synthetic construct
  REGION 1..13: note = Modified peptide: 242
  SITE 1: note = Mod_Res - C-terminal is: ac
  SITE 1: note = misc_feature - Modified Amino Acid: Pen
  SITE 4: note = misc_feature - Modified Amino Acid: 7MeW
  SITE 5: note = misc_feature - Modified Amino Acid: KAc
  SITE 6: note = misc_feature - Modified Amino Acid: Pen
  SITE 7: note = misc_feature - Modified Amino Acid: AEF
  SITE 8: note = misc_feature - Modified Amino Acid: 2Nal
  SITE 9: note = misc_feature - Modified Amino Acid: aMeK
  SITE 10: note = misc_feature - Modified Amino Acid: KAc
  SITE 12: note = misc_feature - Modified Amino Acid: aMePhe
  SITE 13: note = Mod_Res - N-terminal is: am
  REGION 1..6: note = Disulfid - Cyclic bond: Pen to Pen
XNTWKXXXKKNFY

SEQ ID NO: 202 - protein, 13 aa, synthetic construct
  REGION 1..13: note = Modified peptide: 245dR
  SITE 1: note = Mod_Res - C-terminal is: ac
  SITE 1: note = misc_feature - Modified Amino Acid: dR
  SITE 2: note = misc_feature - Modified Amino Acid: Pen
  SITE 6: note = misc_feature - Modified Amino Acid: KAc
  SITE 7: note = misc_feature - Modified Amino Acid: Pen
  SITE 8: note = misc_feature - Modified Amino Acid: AEF
  SITE 9: note = misc_feature - Modified Amino Acid: 2Nal
  SITE 10: note = misc_feature - Modified Amino Acid: Acpx
  SITE 13: note = misc_feature - Modified Amino Acid: aMeF
  SITE 13: note = Mod_Res - N-terminal is: am
  REGION 2..7: note = Disulfid - Cyclic bond: Pen to Pen
RXNTWKXXXXENF

SEQ ID NO: 203 - protein, 12 aa, synthetic construct
  REGION 1..12: note = Modified peptide: 247
  SITE 1: note = Mod_Res - C-terminal is: ac
  SITE 1: note = misc_feature - Modified Amino Acid: Pen
  SITE 4: note = misc_feature - Modified Amino Acid: 7MeW
  SITE 5: note = misc_feature - Modified Amino Acid: Cit
  SITE 6: note = misc_feature - Modified Amino Acid: Pen
  SITE 7: note = misc_feature - Modified Amino Acid: AEF
  SITE 8: note = misc_feature - Modified Amino Acid: 2Nal
  SITE 9: note = misc_feature - Modified Amino Acid: aMeL
  SITE 10: note = misc_feature - Modified Amino Acid: KAc
  SITE 12: note = misc_feature - Modified Amino Acid: aMePhe
  SITE 12: note = Mod_Res - N-terminal is: am
  REGION 1..6: note = Disulfid - Cyclic bond: Pen to Pen
XNTWXXXXLKNF

SEQ ID NO: 204 - protein, 13 aa, synthetic construct
  REGION 1..13: note = Modified peptide: 249dR
  SITE 1: note = Mod_Res - C-terminal is: ac
  SITE 1: note = misc_feature - Modified Amino Acid: dR
  SITE 2: note = misc_feature - Modified Amino Acid: Pen
  SITE 6: note = misc_feature - Modified Amino Acid: KAc
  SITE 7: note = misc_feature - Modified Amino Acid: Pen
  SITE 8: note = misc_feature - Modified Amino Acid: AEF
  SITE 9: note = misc_feature - Modified Amino Acid: 2Nal
  SITE 10: note = misc_feature - Modified Amino Acid: THP
  SITE 13: note = misc_feature - Modified Amino Acid: aMePhe
  SITE 13: note = Mod_Res - N-terminal is: am
  REGION 2..7: note = Disulfid - Cyclic bond: Pen to Pen
RXNTWKXXXXENF

SEQ ID NO: 205 - protein, 13 aa, synthetic construct
  REGION 1..13: note = Modified peptide: 252dR
  SITE 1: note = Mod_Res - C-terminal is: ac
  SITE 1: note = misc_feature - Modified Amino Acid: dR
  SITE 2: note = misc_feature - Modified Amino Acid: Pen
  SITE 5: note = misc_feature - Modified Amino Acid: bMeW(2S3S)
  SITE 6: note = misc_feature - Modified Amino Acid: KAc
  SITE 7: note = misc_feature - Modified Amino Acid: Pen
  SITE 8: note = misc_feature - Modified Amino Acid: AEF
  SITE 9: note = misc_feature - Modified Amino Acid: 2Nal
  SITE 10: note = misc_feature - Modified Amino Acid: THP
  SITE 13: note = misc_feature - Modified Amino Acid: aMePhe
  SITE 13: note = Mod_Res - N-terminal is: am
  REGION 2..7: note = Disulfid - Cyclic bond: Pen to Pen
RXNTXKXXXXENF

SEQ ID NO: 206 - protein, 13 aa, synthetic construct
  REGION 1..13: note = Modified peptide: 253dR
  SITE 1: note = Mod_Res - C-terminal is: ac
  SITE 1: note = misc_feature - Modified Amino Acid: dR
  SITE 2: note = misc_feature - Modified Amino Acid: Pen
  SITE 7: note = misc_feature - Modified Amino Acid: Pen
  SITE 8: note = misc_feature - Modified Amino Acid: AEF
  SITE 9: note = misc_feature - Modified Amino Acid: 2Nal
  SITE 10: note = misc_feature - Modified Amino Acid: THP
  SITE 13: note = misc_feature - Modified Amino Acid: D(NBzl)
  SITE 13: note = Mod_Res - N-terminal is: am
  REGION 2..7: note = Disulfid - Cyclic bond: Pen to Pen
RXQTWQXXXXENX

SEQ ID NO: 207 - protein, 13 aa, synthetic construct
  REGION 1..13: note = Modified peptide: 254dR
  SITE 1: note = Mod_Res - C-terminal is: ac
  SITE 1: note = misc_feature - Modified Amino Acid: dR
  SITE 2: note = misc_feature - Modified Amino Acid: Dpr
  SITE 8: note = misc_feature - Modified Amino Acid: AEF
  SITE 9: note = misc_feature - Modified Amino Acid: 2Nal
  SITE 10: note = misc_feature - Modified Amino Acid: THP
  SITE 13: note = misc_feature - Modified Amino Acid: aMePhe
  SITE 13: note = Mod_Res - N-terminal is: am
  REGION 2..7: note = Disulfid - Cyclic bond: Dpr to D
RXQTWQDXXXENF

SEQ ID NO: 208 - protein, 13 aa, synthetic construct
  REGION 1..13: note = Modified peptide: 255dR
  SITE 1: note = Mod_Res - C-terminal is: ac
  SITE 1: note = misc_feature - Modified Amino Acid: dR
  SITE 2: note = misc_feature - Modified Amino Acid: Dpr
  SITE 8: note = misc_feature - Modified Amino Acid: AEF
  SITE 9: note = misc_feature - Modified Amino Acid: 2Nal
  SITE 10: note = misc_feature - Modified Amino Acid: THP
  SITE 13: note = misc_feature - Modified Amino Acid: aMePhe
  SITE 13: note = Mod_Res - N-terminal is: am
  REGION 5..7: note = Disulfid - Cyclic bond: R to D
RXQTWQDXXXENF

SEQ ID NO: 209 - protein, 13 aa, synthetic construct
  REGION 1..13: note = Modified peptide: 256
  SITE 1: note = Mod_Res - C-terminal is: ac
  SITE 1: note = misc_feature - Modified Amino Acid: Pen
  SITE 4: note = misc_feature - Modified Amino Acid: 7MeW
  SITE 5: note = misc_feature - Modified Amino Acid: KAc
  SITE 6: note = misc_feature - Modified Amino Acid: Pen
  SITE 7: note = misc_feature - Modified Amino Acid: AEF
  SITE 8: note = misc_feature - Modified Amino Acid: 2Nal
  SITE 9: note = misc_feature - Modified Amino Acid: aMeK
  SITE 10: note = misc_feature - Modified Amino Acid: KAc
  SITE 12: note = misc_feature - Modified Amino Acid: aMePhe
  SITE 13: note = misc_feature - Modified Amino Acid: paf
  SITE 13: note = Mod_Res - N-terminal is: am
  REGION 1..6: note = Disulfid - Cyclic bond: Pen to Pen
XNTWKXXXKKNFX

SEQ ID NO: 210 - protein, 13 aa, synthetic construct
  REGION 1..13: note = Modified peptide: 257
  SITE 1: note = Mod_Res - C-terminal is: ac
  SITE 1: note = misc_feature - Modified Amino Acid: Pen
  SITE 4: note = misc_feature - Modified Amino Acid: 7MeW
  SITE 5: note = misc_feature - Modified Amino Acid: KAc
  SITE 6: note = misc_feature - Modified Amino Acid: Pen
  SITE 7: note = misc_feature - Modified Amino Acid: AEF
  SITE 8: note = misc_feature - Modified Amino Acid: 2Nal
  SITE 9: note = misc_feature - Modified Amino Acid: aMeK
  SITE 10: note = misc_feature - Modified Amino Acid: KAc
  SITE 12: note = misc_feature - Modified Amino Acid: aMePhe
  SITE 13: note = misc_feature - Modified Amino Acid: maf
  SITE 13: note = Mod_Res - N-terminal is: am
  REGION 1..6: note = Disulfid - Cyclic bond: Pen to Pen
XNTWKXXXKKNFX

SEQ ID NO: 211 - protein, 14 aa, synthetic construct
  REGION 1..14: note = Modified peptide: 259dR
  SITE 1: note = Mod_Res - C-terminal is: ac
  SITE 1: note = misc_feature - Modified Amino Acid: dR
  SITE 2: note = misc_feature - Modified Amino Acid: Pen
  SITE 5: note = misc_feature - Modified Amino Acid: 7MeW
  SITE 6: note = misc_feature - Modified Amino Acid: KAc
  SITE 7: note = misc_feature - Modified Amino Acid: Pen
  SITE 8: note = misc_feature - Modified Amino Acid: AEF
  SITE 9: note = misc_feature - Modified Amino Acid: 2Nal
  SITE 10: note = misc_feature - Modified Amino Acid: aMeK
  SITE 14: note = Mod_Res - N-terminal is: am
  REGION 2..7: note = Disulfid - Cyclic bond: Pen to Pen
RXNTWKXXXKENHY

SEQ ID NO: 212 - protein, 13 aa, synthetic construct
  REGION 1..13: note = Modified peptide: 260
  SITE 1: note = Mod_Res - C-terminal is: ac
  SITE 1: note = misc_feature - Modified Amino Acid: Pen
  SITE 4: note = misc_feature - Modified Amino Acid: 7MeW
  SITE 5: note = misc_feature - Modified Amino Acid: KAc
  SITE 6: note = misc_feature - Modified Amino Acid: Pen
  SITE 7: note = misc_feature - Modified Amino Acid: AEF
  SITE 8: note = misc_feature - Modified Amino Acid: 2Nal
  SITE 9: note = misc_feature - Modified Amino Acid: aMeK
  SITE 10: note = misc_feature - Modified Amino Acid: KAc
  SITE 12: note = misc_feature - Modified Amino Acid: aMePhe
  SITE 13: note = misc_feature - Modified Amino Acid: D3Pya
  SITE 13: note = Mod_Res - N-terminal is: am
  REGION 1..6: note = Disulfid - Cyclic bond: Pen to Pen
XNTWKXXXKKNFX

SEQ ID NO: 213 - protein, 13 aa, synthetic construct
  REGION 1..13: note = Modified peptide: 268
  SITE 1: note = Mod_Res - C-terminal is: ac
  SITE 1: note = misc_feature - Modified Amino Acid: Pen
  SITE 4: note = misc_feature - Modified Amino Acid: 7MeW
  SITE 5: note = misc_feature - Modified Amino Acid: KAc
  SITE 6: note = misc_feature - Modified Amino Acid: Pen
  SITE 7: note = misc_feature - Modified Amino Acid: AEF
  SITE 8: note = misc_feature - Modified Amino Acid: 2Nal
  SITE 9: note = misc_feature - Modified Amino Acid: aMeK
  SITE 10: note = misc_feature - Modified Amino Acid: KAc
  SITE 13: note = Mod_Res - N-terminal is: am
  REGION 1..6: note = Disulfid - Cyclic bond: Pen to Pen
XNTWKXXXKKNHY

SEQ ID NO: 214 - protein, 13 aa, synthetic construct
  REGION 1..13: note = Modified peptide: 270
  SITE 1: note = Mod_Res - C-terminal is: ac
  SITE 1: note = misc_feature - Modified Amino Acid: Pen
  SITE 4: note = misc_feature - Modified Amino Acid: 7MeW
  SITE 5: note = misc_feature - Modified Amino Acid: Cit
  SITE 6: note = misc_feature - Modified Amino Acid: Pen
  SITE 7: note = misc_feature - Modified Amino Acid: AEF
  SITE 8: note = misc_feature - Modified Amino Acid: 2Nal
  SITE 9: note = misc_feature - Modified Amino Acid: aMeK
  SITE 10: note = misc_feature - Modified Amino Acid: KAc
  SITE 12: note = misc_feature - Modified Amino Acid: Aib
  SITE 13: note = misc_feature - Modified Amino Acid: bAla
  SITE 13: note = Mod_Res - N-terminal is: am
  REGION 1..6: note = Disulfid - Cyclic bond: Pen to Pen
XNTWXXXXKKNXA

SEQ ID NO: 215 - protein, 13 aa, synthetic construct
  REGION 1..13: note = Modified peptide: 271
  SITE 1: note = Mod_Res - C-terminal is: ac
  SITE 1: note = misc_feature - Modified Amino Acid: Pen
  SITE 4: note = misc_feature - Modified Amino Acid: 7MeW
  SITE 5: note = misc_feature - Modified Amino Acid: KAc
  SITE 6: note = misc_feature - Modified Amino Acid: Pen
  SITE 7: note = misc_feature - Modified Amino Acid: AEF
  SITE 8: note = misc_feature - Modified Amino Acid: 3Quin
  SITE 9: note = misc_feature - Modified Amino Acid: aMeK
  SITE 10: note = misc_feature - Modified Amino Acid: KAc
  SITE 13: note = misc_feature - Modified Amino Acid: MeGly
  SITE 13: note = Mod_Res - N-terminal is: am
  REGION 1..6: note = Disulfid - Cyclic bond: Pen to Pen
XNTWKXXXKKNHG

SEQ ID NO: 216 - protein, 13 aa, synthetic construct
  REGION 1..13: note = Modified peptide: 274
  SITE 1: note = Mod_Res - C-terminal is: ac
  SITE 1: note = misc_feature - Modified Amino Acid: Pen
  SITE 4: note = misc_feature - Modified Amino Acid: 7PhW
  SITE 5: note = misc_feature - Modified Amino Acid: KAc
  SITE 6: note = misc_feature - Modified Amino Acid: Pen
  SITE 7: note = misc_feature - Modified Amino Acid: AEF
  SITE 8: note = misc_feature - Modified Amino Acid: 3Quin
  SITE 9: note = misc_feature - Modified Amino Acid: THP
  SITE 12: note = misc_feature - Modified Amino Acid: dK
  SITE 13: note = misc_feature - Modified Amino Acid: MeGly
  SITE 13: note = Mod_Res - N-terminal is: am
  REGION 1..6: note = Disulfid - Cyclic bond: Pen to Pen
XNTWKXXXXENKG

SEQ ID NO: 217 - protein, 13 aa, synthetic construct
  REGION 1..13: note = Modified peptide: 275
  SITE 1: note = Mod_Res - C-terminal is: ac
  SITE 1: note = misc_feature - Modified Amino Acid: Pen
  SITE 4: note = misc_feature - Modified Amino Acid: 7PhW
  SITE 5: note = misc_feature - Modified Amino Acid: KAc
  SITE 6: note = misc_feature - Modified Amino Acid: Pen
  SITE 7: note = misc_feature - Modified Amino Acid: AEF
  SITE 8: note = misc_feature - Modified Amino Acid: 3Quin
  SITE 9: note = misc_feature - Modified Amino Acid: aMeK
  SITE 10: note = misc_feature - Modified Amino Acid: KAc
  SITE 12: note = misc_feature - Modified Amino Acid: dK
  SITE 13: note = misc_feature - Modified Amino Acid: MeGly
  SITE 13: note = Mod_Res - N-terminal is: am
  REGION 1..6: note = Disulfid - Cyclic bond: Pen to Pen
XNTWKXXXKKNKG

SEQ ID NO: 218 - protein, 13 aa, synthetic construct
  REGION 1..13: note = Modified peptide: 276
  SITE 1: note = Mod_Res - C-terminal is: ac
  SITE 1: note = misc_feature - Modified Amino Acid: Pen
  SITE 4: note = misc_feature - Modified Amino Acid: 7PhW
  SITE 5: note = misc_feature - Modified Amino Acid: KAc
  SITE 6: note = misc_feature - Modified Amino Acid: Pen
  SITE 7: note = misc_feature - Modified Amino Acid: AEF
  SITE 8: note = misc_feature - Modified Amino Acid: 3Quin
  SITE 9: note = misc_feature - Modified Amino Acid: THP
  SITE 13: note = misc_feature - Modified Amino Acid: MeGly
  SITE 13: note = Mod_Res - N-terminal is: am
  REGION 1..6: note = Disulfid - Cyclic bond: Pen to Pen
XNTWKXXXXENHG

SEQ ID NO: 219 - protein, 13 aa, synthetic construct
  REGION 1..13: note = Modified peptide: 277
  SITE 1: note = Mod_Res - C-terminal is: ac
  SITE 1: note = misc_feature - Modified Amino Acid: Pen
  SITE 4: note = misc_feature - Modified Amino Acid: 7PhW
  SITE 5: note = misc_feature - Modified Amino Acid: KAc
  SITE 6: note = misc_feature - Modified Amino Acid: Pen
  SITE 7: note = misc_feature - Modified Amino Acid: AEF
  SITE 8: note = misc_feature - Modified Amino Acid: 3Quin
  SITE 9: note = misc_feature - Modified Amino Acid: aMeK
  SITE 10: note = misc_feature - Modified Amino Acid: KAc
  SITE 13: note = misc_feature - Modified Amino Acid: MeGly
  SITE 13: note = Mod_Res - N-terminal is: am
  REGION 1..6: note = Disulfid - Cyclic bond: Pen to Pen
XNTWKXXXKKNHG

SEQ ID NO: 220 - protein, 13 aa, synthetic construct
  REGION 1..13: note = Modified peptide: 278dR
  SITE 1: note = Mod_Res - C-terminal is: ac
  SITE 1: note = misc_feature - Modified Amino Acid: dR
  SITE 2: note = misc_feature - Modified Amino Acid: Abu
  SITE 8: note = misc_feature - Modified Amino Acid: AEF
  SITE 9: note = misc_feature - Modified Amino Acid: 2Nal
  SITE 10: note = misc_feature - Modified Amino Acid: THP
  SITE 13: note = misc_feature - Modified Amino Acid: aMePhe
  SITE 13: note = Mod_Res - N-terminal is: am
  REGION 2..7: note = Disulfid - Cyclic bond: Abu to C
RXQTWQCXXXENF

SEQ ID NO: 221 - protein, 13 aa, synthetic construct
  REGION 1..13: note = Modified peptide: 279
  SITE 1: note = Mod_Res - C-terminal is: ac
  SITE 1: note = misc_feature - Modified Amino Acid: Pen
  SITE 4: note = misc_feature - Modified Amino Acid: 7MeW
  SITE 5: note = misc_feature - Modified Amino Acid: KAc
  SITE 6: note = misc_feature - Modified Amino Acid: Pen
  SITE 7: note = misc_feature - Modified Amino Acid: AEF
  SITE 8: note = misc_feature - Modified Amino Acid: 3Quin
  SITE 9: note = misc_feature - Modified Amino Acid: THP
  SITE 12: note = misc_feature - Modified Amino Acid: dL
  SITE 13: note = misc_feature - Modified Amino Acid: MeGly
  SITE 13: note = Mod_Res - N-terminal is: am
  REGION 1..6: note = Disulfid - Cyclic bond: Pen to Pen
XNTWKXXXXENLG

SEQ ID NO: 222 - protein, 13 aa, synthetic construct
  REGION 1..13: note = Modified peptide: 280
  SITE 1: note = Mod_Res - C-terminal is: ac
  SITE 1: note = misc_feature - Modified Amino Acid: Pen
  SITE 4: note = misc_feature - Modified Amino Acid: 7EtW
  SITE 5: note = misc_feature - Modified Amino Acid: KAc
  SITE 6: note = misc_feature - Modified Amino Acid: Pen
  SITE 7: note = misc_feature - Modified Amino Acid: AEF
  SITE 8: note = misc_feature - Modified Amino Acid: 2Nal
  SITE 9: note = misc_feature - Modified Amino Acid: aMeK
  SITE 10: note = misc_feature - Modified Amino Acid: KAc
  SITE 13: note = misc_feature - Modified Amino Acid: MeGly
  SITE 13: note = Mod_Res - N-terminal is: am
  REGION 1..6: note = Disulfid - Cyclic bond: Pen to Pen
XNTWKXXXKKNHG

SEQ ID NO: 223 - protein, 13 aa, synthetic construct
  REGION 1..13: note = Modified peptide: 281
  SITE 1: note = Mod_Res - C-terminal is: ac
  SITE 1: note = misc_feature - Modified Amino Acid: Pen
  SITE 4: note = misc_feature - Modified Amino Acid: 7EtW
  SITE 5: note = misc_feature - Modified Amino Acid: KAc
  SITE 6: note = misc_feature - Modified Amino Acid: Pen
  SITE 7: note = misc_feature - Modified Amino Acid: AEF
  SITE 8: note = misc_feature - Modified Amino Acid: 2Nal
  SITE 9: note = misc_feature - Modified Amino Acid: THP
  SITE 13: note = misc_feature - Modified Amino Acid: MeGly
  SITE 13: note = Mod_Res - N-terminal is: am
  REGION 1..6: note = Disulfid - Cyclic bond: Pen to Pen
XNTWKXXXXENHG

SEQ ID NO: 224 - protein, 13 aa, synthetic construct
  REGION 1..13: note = Modified peptide: 282
  SITE 1: note = Mod_Res - C-terminal is: ac
  SITE 1: note = misc_feature - Modified Amino Acid: Pen
  SITE 4: note = misc_feature - Modified Amino Acid: 7MeW
  SITE 5: note = misc_feature - Modified Amino Acid: KAc
  SITE 6: note = misc_feature - Modified Amino Acid: Pen
  SITE 7: note = misc_feature - Modified Amino Acid: AEF
  SITE 8: note = misc_feature - Modified Amino Acid: 2Nal
  SITE 9: note = misc_feature - Modified Amino Acid: THP
  SITE 13: note = misc_feature - Modified Amino Acid: MeGly
  SITE 13: note = Mod_Res - N-terminal is: am
  REGION 1..6: note = Disulfid - Cyclic bond: Pen to Pen
XNTWKXXXXENHG

SEQ ID NO: 225 - protein, 13 aa, synthetic construct
  REGION 1..13: note = Modified peptide: 284
  SITE 1: note = Mod_Res - C-terminal is: ac
  SITE 1: note = misc_feature - Modified Amino Acid: Pen
  SITE 4: note = misc_feature - Modified Amino Acid: 7MeW
  SITE 5: note = misc_feature - Modified Amino Acid: KGly)
  SITE 6: note = misc_feature - Modified Amino Acid: Pen
  SITE 7: note = misc_feature - Modified Amino Acid: AEF
  SITE 8: note = misc_feature - Modified Amino Acid: 2Nal
  SITE 9: note = misc_feature - Modified Amino Acid: THP
  SITE 13: note = misc_feature - Modified Amino Acid: MeGly
  SITE 13: note = Mod_Res - N-terminal is: am
  REGION 1..6: note = Disulfid - Cyclic bond: Pen to Pen
XNTWXXXXXENHG

SEQ ID NO: 226 - protein, 13 aa, synthetic construct
  REGION 1..13: note = Modified peptide: 285dR
  SITE 1: note = Mod_Res - C-terminal is: ac
  SITE 1: note = misc_feature - Modified Amino Acid: dR
  SITE 2: note = misc_feature - Modified Amino Acid: Pen
  SITE 5: note = misc_feature - Modified Amino Acid: 7MeW
  SITE 6: note = misc_feature - Modified Amino Acid: KAc
  SITE 7: note = misc_feature - Modified Amino Acid: Pen
  SITE 8: note = misc_feature - Modified Amino Acid: AEF
  SITE 9: note = misc_feature - Modified Amino Acid: 2Nal
  SITE 10: note = misc_feature - Modified Amino Acid: THP
  SITE 11: note = misc_feature - Modified Amino Acid: KAc
  SITE 13: note = misc_feature - Modified Amino Acid: aMePhe
  SITE 13: note = Mod_Res - N-terminal is: am
  REGION 2..7: note = Disulfid - Cyclic bond: Pen to Pen
RXNTWKXXXXKNF

SEQ ID NO: 227 - protein, 13 aa, synthetic construct
  REGION 1..13: note = Modified peptide: 286dR
  SITE 1: note = Mod_Res - C-terminal is: ac
  SITE 1: note = misc_feature - Modified Amino Acid: dR
  SITE 2: note = misc_feature - Modified Amino Acid: Pen
  SITE 7: note = misc_feature - Modified Amino Acid: Pen
  SITE 8: note = misc_feature - Modified Amino Acid: AEF
  SITE 9: note = misc_feature - Modified Amino Acid: 2Nal
  SITE 10: note = misc_feature - Modified Amino Acid: THP
  SITE 13: note = misc_feature - Modified Amino Acid: D(NPh)
  SITE 13: note = Mod_Res - N-terminal is: am
  REGION 2..7: note = Disulfid - Cyclic bond: Pen to Pen
RXQTWQXXXXENX

SEQ ID NO: 228 - protein, 13 aa, synthetic construct
  REGION 1..13: note = Modified peptide: 287dR
  SITE 1: note = Mod_Res - C-terminal is: ac
  SITE 1: note = misc_feature - Modified Amino Acid: dR
  SITE 2: note = misc_feature - Modified Amino Acid: Pen
  SITE 7: note = misc_feature - Modified Amino Acid: Pen
  SITE 8: note = misc_feature - Modified Amino Acid: AEF
  SITE 9: note = misc_feature - Modified Amino Acid: 2Nal
  SITE 10: note = misc_feature - Modified Amino Acid: THP
  SITE 13: note = misc_feature - Modified Amino Acid: D(NoAn)
  SITE 13: note = Mod_Res - N-terminal is: am
  REGION 2..7: note = Disulfid - Cyclic bond: Pen to Pen
RXQTWQXXXXENX

SEQ ID NO: 229 - protein, 13 aa, synthetic construct
  REGION 1..13: note = Modified peptide: 288dR
  SITE 1: note = Mod_Res - C-terminal is: ac
  SITE 1: note = misc_feature - Modified Amino Acid: dR
  SITE 2: note = misc_feature - Modified Amino Acid: Pen
  SITE 7: note = misc_feature - Modified Amino Acid: Pen
  SITE 8: note = misc_feature - Modified Amino Acid: AEF
  SITE 9: note = misc_feature - Modified Amino Acid: 2Nal
  SITE 10: note = misc_feature - Modified Amino Acid: THP
  SITE 13: note = misc_feature - Modified Amino Acid: D(NPip)
  SITE 13: note = Mod_Res - N-terminal is: am
  REGION 2..7: note = Disulfid - Cyclic bond: Pen to Pen
RXQTWQXXXXENX

SEQ ID NO: 230 - protein, 13 aa, synthetic construct
  REGION 1..13: note = Modified peptide: 289dR
  SITE 1: note = Mod_Res - C-terminal is: ac
  SITE 1: note = misc_feature - Modified Amino Acid: dR
  SITE 2: note = misc_feature - Modified Amino Acid: Pen
  SITE 7: note = misc_feature - Modified Amino Acid: Pen
  SITE 8: note = misc_feature - Modified Amino Acid: AEF
  SITE 9: note = misc_feature - Modified Amino Acid: 2Nal
  SITE 10: note = misc_feature - Modified Amino Acid: THP
  SITE 13: note = misc_feature - Modified Amino Acid: D(NPyr)
  SITE 13: note = Mod_Res - N-terminal is: am
  REGION 2..7: note = Disulfid - Cyclic bond: Pen to Pen
RXQTWQXXXXENX

SEQ ID NO: 231 - protein, 13 aa, synthetic construct
  REGION 1..13: note = Modified peptide: 290dR
  SITE 1: note = Mod_Res - C-terminal is: ac
  SITE 1: note = misc_feature - Modified Amino Acid: dR
  SITE 2: note = misc_feature - Modified Amino Acid: Pen
  SITE 7: note = misc_feature - Modified Amino Acid: Pen
  SITE 8: note = misc_feature - Modified Amino Acid: AEF
  SITE 9: note = misc_feature - Modified Amino Acid: 2Nal
  SITE 10: note = misc_feature - Modified Amino Acid: THP
  SITE 13: note = misc_feature - Modified Amino Acid: D(NpAn)
  SITE 13: note = Mod_Res - N-terminal is: am
  REGION 2..7: note = Disulfid - Cyclic bond: Pen to Pen
RXQTWQXXXXENX

SEQ ID NO: 232 - protein, 13 aa, synthetic construct
  REGION 1..13: note = Modified peptide: 291dR
  SITE 1: note = Mod_Res - C-terminal is: ac
  SITE 1: note = misc_feature - Modified Amino Acid: dR
  SITE 2: note = misc_feature - Modified Amino Acid: Pen
  SITE 7: note = misc_feature - Modified Amino Acid: Pen
  SITE 8: note = misc_feature - Modified Amino Acid: AEF
  SITE 9: note = misc_feature - Modified Amino Acid: 2Nal
  SITE 10: note = misc_feature - Modified Amino Acid: THP
  SITE 13: note = misc_feature - Modified Amino Acid: D(NmAn)
  SITE 13: note = Mod_Res - N-terminal is: am
  REGION 2..7: note = Disulfid - Cyclic bond: Pen to Pen
RXQTWQXXXXENX

SEQ ID NO: 233 - protein, 13 aa, synthetic construct
  REGION 1..13: note = Modified peptide: 292dR
  SITE 1: note = Mod_Res - C-terminal is: ac
  SITE 1: note = misc_feature - Modified Amino Acid: dR
  SITE 2: note = misc_feature - Modified Amino Acid: Pen
  SITE 7: note = misc_feature - Modified Amino Acid: Pen
  SITE 8: note = misc_feature - Modified Amino Acid: AEF
  SITE 9: note = misc_feature - Modified Amino Acid: 2Nal
  SITE 10: note = misc_feature - Modified Amino Acid: THP
  SITE 13: note = misc_feature - Modified Amino Acid: D(N4Pyz)
  SITE 13: note = Mod_Res - N-terminal is: am
  REGION 2..7: note = Disulfid - Cyclic bond: Pen to Pen
RXQTWQXXXXENX

SEQ ID NO: 234 - protein, 13 aa, synthetic construct
  REGION 1..13: note = Modified peptide: 293dR
  SITE 1: note = Mod_Res - C-terminal is: ac
  SITE 1: note = misc_feature - Modified Amino Acid: dR
  SITE 2: note = misc_feature - Modified Amino Acid: Pen
  SITE 7: note = misc_feature - Modified Amino Acid: Pen
  SITE 8: note = misc_feature - Modified Amino Acid: AEF
  SITE 9: note = misc_feature - Modified Amino Acid: 2Nal
  SITE 10: note = misc_feature - Modified Amino Acid: THP
  SITE 13: note = misc_feature - Modified Amino Acid: D(N5In)
  SITE 13: note = Mod_Res - N-terminal is: am
  REGION 2..7: note = Disulfid - Cyclic bond: Pen to Pen
RXQTWQXXXXENX

SEQ ID NO: 235 - protein, 13 aa, synthetic construct
  REGION 1..13: note = Modified peptide: 295
  SITE 1: note = Mod_Res - C-terminal is: ac
  SITE 1: note = misc_feature - Modified Amino Acid: Pen
  SITE 4: note = misc_feature - Modified Amino Acid: 7MeW
  SITE 5: note = misc_feature - Modified Amino Acid: KAc
  SITE 6: note = misc_feature - Modified Amino Acid: Pen
  SITE 7: note = misc_feature - Modified Amino Acid: AEF
  SITE 8: note = misc_feature - Modified Amino Acid: 2Nal
  SITE 9: note = misc_feature - Modified Amino Acid: aMeK
  SITE 10: note = misc_feature - Modified Amino Acid: KAc
  SITE 13: note = misc_feature - Modified Amino Acid: MeGly
  SITE 13: note = Mod_Res - N-terminal is: am
  REGION 1..6: note = Disulfid - Cyclic bond: Pen to Pen
XNTWKXXXKKNHG

SEQ ID NO: 236 - protein, 13 aa, synthetic construct
  REGION 1..13: note = Modified peptide: 296
  SITE 1: note = Mod_Res - C-terminal is: ac
  SITE 1: note = misc_feature - Modified Amino Acid: Pen
  SITE 4: note = misc_feature - Modified Amino Acid: 7MeW
  SITE 5: note = misc_feature - Modified Amino Acid: KAc
  SITE 6: note = misc_feature - Modified Amino Acid: Pen
  SITE 7: note = misc_feature - Modified Amino Acid: AEF
  SITE 8: note = misc_feature - Modified Amino Acid: 3Quin
  SITE 9: note = misc_feature - Modified Amino Acid: THP
  SITE 13: note = misc_feature - Modified Amino Acid: MeGly
  SITE 13: note = Mod_Res - N-terminal is: am
  REGION 1..6: note = Disulfid - Cyclic bond: Pen to Pen
XNTWKXXXXENHG

SEQ ID NO: 237 - protein, 13 aa, synthetic construct
  REGION 1..13: note = Modified peptide: 297
  SITE 1: note = Mod_Res - C-terminal is: ac
  SITE 1: note = misc_feature - Modified Amino Acid: Pen
  SITE 4: note = misc_feature - Modified Amino Acid: 7PhW
  SITE 5: note = misc_feature - Modified Amino Acid: KAc
  SITE 6: note = misc_feature - Modified Amino Acid: Pen
  SITE 7: note = misc_feature - Modified Amino Acid: AEF
  SITE 8: note = misc_feature - Modified Amino Acid: 2Nal
  SITE 9: note = misc_feature - Modified Amino Acid: THP
  SITE 13: note = misc_feature - Modified Amino Acid: MeGly
  SITE 13: note = Mod_Res - N-terminal is: am
  REGION 1..6: note = Disulfid - Cyclic bond: Pen to Pen
XNTWKXXXXENHG

SEQ ID NO: 238 - protein, 13 aa, synthetic construct
  REGION 1..13: note = Modified peptide: 298
  SITE 1: note = Mod_Res - C-terminal is: ac
  SITE 1: note = misc_feature - Modified Amino Acid: Pen
  SITE 4: note = misc_feature - Modified Amino Acid: 7PhW
  SITE 5: note = misc_feature - Modified Amino Acid: KAc
  SITE 6: note = misc_feature - Modified Amino Acid: Pen
  SITE 7: note = misc_feature - Modified Amino Acid: AEF
  SITE 8: note = misc_feature - Modified Amino Acid: 2Nal
  SITE 9: note = misc_feature - Modified Amino Acid: aMeK
  SITE 10: note = misc_feature - Modified Amino Acid: KAc
  SITE 13: note = misc_feature - Modified Amino Acid: MeGly
  SITE 13: note = Mod_Res - N-terminal is: am
  REGION 1..6: note = Disulfid - Cyclic bond: Pen to Pen
XNTWKXXXKKNHG

SEQ ID NO: 239 - protein, 13 aa, synthetic construct
  REGION 1..13: note = Modified peptide: 304dR
  SITE 1: note = Mod_Res - C-terminal is: ac
  SITE 1: note = misc_feature - Modified Amino Acid: dR
  SITE 2: note = misc_feature - Modified Amino Acid: Pen
  SITE 7: note = misc_feature - Modified Amino Acid: Pen
  SITE 8: note = misc_feature - Modified Amino Acid: AEF
  SITE 9: note = misc_feature - Modified Amino Acid: 2Nal
  SITE 10: note = misc_feature - Modified Amino Acid: THP
  SITE 13: note = misc_feature - Modified Amino Acid: D(NPrAm)
  SITE 13: note = Mod_Res - N-terminal is: am
  REGION 2..7: note = Disulfid - Cyclic bond: Pen to Pen
RXQTWQXXXXENX

SEQ ID NO: 240 - protein, 12 aa, synthetic construct
  REGION 1..12: note = Modified peptide: 306
  SITE 1: note = Mod_Res - C-terminal is: ac
  SITE 1: note = misc_feature - Modified Amino Acid: Pen
  SITE 4: note = misc_feature - Modified Amino Acid: 7MeW
  SITE 5: note = misc_feature - Modified Amino Acid: KAc
  SITE 6: note = misc_feature - Modified Amino Acid: Pen
  SITE 7: note = misc_feature - Modified Amino Acid: AEF
  SITE 8: note = misc_feature - Modified Amino Acid: 2Nal
  SITE 9: note = misc_feature - Modified Amino Acid: THP
  SITE 12: note = misc_feature - Modified Amino Acid: aMePhe
  SITE 12: note = Mod_Res - N-terminal is: am
  REGION 1..6: note = Disulfid - Cyclic bond: Pen to Pen
XNTWKXXXXKNF

SEQ ID NO: 241 - protein, 12 aa, synthetic construct
  REGION 1..12: note = Modified peptide: 307
  SITE 1: note = Mod_Res - C-terminal is: ac
  SITE 1: note = misc_feature - Modified Amino Acid: Pen
  SITE 4: note = misc_feature - Modified Amino Acid: 7MeW
  SITE 5: note = misc_feature - Modified Amino Acid: KAc
  SITE 6: note = misc_feature - Modified Amino Acid: Pen
  SITE 7: note = misc_feature - Modified Amino Acid: AEF
  SITE 8: note = misc_feature - Modified Amino Acid: 2Nal
  SITE 9: note = misc_feature - Modified Amino Acid: THP
  SITE 12: note = misc_feature - Modified Amino Acid: aMePhe
  SITE 12: note = Mod_Res - N-terminal is: am
  REGION 1..6: note = Disulfid - Cyclic bond: Pen to Pen
XNTWKXXXXKNF

SEQ ID NO: 242 - protein, 13 aa, synthetic construct
  REGION 1..13: note = Modified peptide: 310dR
  SITE 1: note = Mod_Res - C-terminal is: PentCO
  SITE 1: note = misc_feature - Modified Amino Acid: dR
  SITE 2: note = misc_feature - Modified Amino Acid: Pen
  SITE 5: note = misc_feature - Modified Amino Acid: 7MeW
  SITE 6: note = misc_feature - Modified Amino Acid: KAc
  SITE 7: note = misc_feature - Modified Amino Acid: Pen
  SITE 8: note = misc_feature - Modified Amino Acid: AEF
  SITE 9: note = misc_feature - Modified Amino Acid: 2Nal
  SITE 10: note = misc_feature - Modified Amino Acid: THP
  SITE 13: note = misc_feature - Modified Amino Acid: aMePhe
  SITE 13: note = Mod_Res - N-terminal is: am
  REGION 2..7: note = Disulfid - Cyclic bond: Pen to Pen
RXNTWKXXXXENF

SEQ ID NO: 243 - protein, 12 aa, synthetic construct
  REGION 1..12: note = Modified peptide: 317
  SITE 1: note = Mod_Res - C-terminal is: ac
  SITE 1: note = misc_feature - Modified Amino Acid: Pen
  SITE 4: note = misc_feature - Modified Amino Acid: 7MeW
  SITE 5: note = misc_feature - Modified Amino Acid: Cit
  SITE 6: note = misc_feature - Modified Amino Acid: Pen
  SITE 7: note = misc_feature - Modified Amino Acid: AEF
  SITE 8: note = misc_feature - Modified Amino Acid: 2Nal
  SITE 9: note = misc_feature - Modified Amino Acid: aMeL
  SITE 10: note = misc_feature - Modified Amino Acid: KAc
  SITE 12: note = Mod_Res - N-terminal is: am
  REGION 1..6: note = Disulfid - Cyclic bond: Pen to Pen
XNTWXXXXLKNH

SEQ ID NO: 244 - protein, 12 aa, synthetic construct
  REGION 1..12: note = Modified peptide: 318
  SITE 1: note = Mod_Res - C-terminal is: ac
  SITE 1: note = misc_feature - Modified Amino Acid: Pen
  SITE 4: note = misc_feature - Modified Amino Acid: 7MeW
  SITE 5: note = misc_feature - Modified Amino Acid: KAc
  SITE 6: note = misc_feature - Modified Amino Acid: Pen
  SITE 7: note = misc_feature - Modified Amino Acid: AEF
  SITE 8: note = misc_feature - Modified Amino Acid: 2Nal
  SITE 9: note = misc_feature - Modified Amino Acid: aMeK
  SITE 10: note = misc_feature - Modified Amino Acid: KAc
  SITE 12: note = Mod_Res - N-terminal is: am
  REGION 1..6: note = Disulfid - Cyclic bond: Pen to Pen
XNTWKXXXKKNH

SEQ ID NO: 245 - protein, 13 aa, synthetic construct
  REGION 1..13: note = Modified peptide: 324dR
  SITE 1: note = Mod_Res - C-terminal is: ac
  SITE 1: note = misc_feature - Modified Amino Acid: dR
  SITE 2: note = misc_feature - Modified Amino Acid: Pen
  SITE 5: note = misc_feature - Modified Amino Acid: 7MeW
  SITE 6: note = misc_feature - Modified Amino Acid: Cit
  SITE 7: note = misc_feature - Modified Amino Acid: Pen
  SITE 8: note = misc_feature - Modified Amino Acid: AEF
  SITE 9: note = misc_feature - Modified Amino Acid: 2Nal
  SITE 10: note = misc_feature - Modified Amino Acid: aMeL
  SITE 13: note = misc_feature - Modified Amino Acid: aMePhe
  SITE 13: note = Mod_Res - N-terminal is: am
  REGION 2..7: note = Disulfid - Cyclic bond: Pen to Pen
RXNTWXXXXLENF

SEQ ID NO: 246 - protein, 13 aa, synthetic construct
  REGION 1..13: note = Modified peptide: 325dR
  SITE 1: note = Mod_Res - C-terminal is: ac
  SITE 1: note = misc_feature - Modified Amino Acid: dR
  SITE 2: note = misc_feature - Modified Amino Acid: Pen
  SITE 5: note = misc_feature - Modified Amino Acid: 7MeW
  SITE 6: note = misc_feature - Modified Amino Acid: KAc
  SITE 7: note = misc_feature - Modified Amino Acid: Pen
  SITE 8: note = misc_feature - Modified Amino Acid: AEF
  SITE 9: note = misc_feature - Modified Amino Acid: 2Nal
  SITE 10: note = misc_feature - Modified Amino Acid: THP
  SITE 13: note = misc_feature - Modified Amino Acid: dH
  SITE 13: note = Mod_Res - N-terminal is: am
  REGION 2..7: note = Disulfid - Cyclic bond: Pen to Pen
RXNTWKXXXXENH

SEQ ID NO: 247 - protein, 12 aa, synthetic construct
  REGION 1..12: note = Modified peptide: 328
  SITE 1: note = Mod_Res - C-terminal is: EtCO
  SITE 1: note = misc_feature - Modified Amino Acid: Pen
  SITE 4: note = misc_feature - Modified Amino Acid: 7MeW
  SITE 5: note = misc_feature - Modified Amino Acid: KAc
  SITE 6: note = misc_feature - Modified Amino Acid: Pen
  SITE 7: note = misc_feature - Modified Amino Acid: AEF
  SITE 8: note = misc_feature - Modified Amino Acid: 2Nal
  SITE 9: note = misc_feature - Modified Amino Acid: aMeK
  SITE 10: note = misc_feature - Modified Amino Acid: KAc
  SITE 12: note = misc_feature - Modified Amino Acid: aMePhe
  SITE 12: note = Mod_Res - N-terminal is: am
  REGION 1..6: note = Disulfid - Cyclic bond: Pen to Pen
XNTWKXXXKKNF

SEQ ID NO: 248 - protein, 13 aa, synthetic construct
  REGION 1..13: note = Modified peptide: 329dR
  SITE 1: note = Mod_Res - C-terminal is: EtCO
  SITE 1: note = misc_feature - Modified Amino Acid: dR
  SITE 2: note = misc_feature - Modified Amino Acid: Pen
  SITE 5: note = misc_feature - Modified Amino Acid: 7MeW
  SITE 6: note = misc_feature - Modified Amino Acid: KAc
  SITE 7: note = misc_feature - Modified Amino Acid: Pen
  SITE 8: note = misc_feature - Modified Amino Acid: AEF
  SITE 9: note = misc_feature - Modified Amino Acid: 2Nal
  SITE 10: note = misc_feature - Modified Amino Acid: THP
  SITE 13: note = misc_feature - Modified Amino Acid: aMePhe
  SITE 13: note = Mod_Res - N-terminal is: am
  REGION 2..7: note = Disulfid - Cyclic bond: Pen to Pen
RXNTWKXXXXENF

SEQ ID NO: 249 - protein, 12 aa, synthetic construct
  REGION 1..12: note = Modified peptide: 330
  SITE 1: note = Mod_Res - C-terminal is: MeSO2
  SITE 1: note = misc_feature - Modified Amino Acid: Pen
  SITE 4: note = misc_feature - Modified Amino Acid: 7MeW
  SITE 5: note = misc_feature - Modified Amino Acid: KAc
  SITE 6: note = misc_feature - Modified Amino Acid: Pen
  SITE 7: note = misc_feature - Modified Amino Acid: AEF
  SITE 8: note = misc_feature - Modified Amino Acid: 2Nal
  SITE 9: note = misc_feature - Modified Amino Acid: aMeK
  SITE 10: note = misc_feature - Modified Amino Acid: KAc
  SITE 12: note = misc_feature - Modified Amino Acid: aMePhe
  SITE 12: note = Mod_Res - N-terminal is: am
  REGION 1..6: note = Disulfid - Cyclic bond: Pen to Pen
XNTWKXXXKKNF

SEQ ID NO: 250 - protein, 12 aa, synthetic construct
  REGION 1..12: note = Modified peptide: 331
  SITE 1: note = Mod_Res - C-terminal is: AzCO
  SITE 1: note = misc_feature - Modified Amino Acid: Pen
  SITE 4: note = misc_feature - Modified Amino Acid: 7MeW
  SITE 5: note = misc_feature - Modified Amino Acid: KAc
  SITE 6: note = misc_feature - Modified Amino Acid: Pen
  SITE 7: note = misc_feature - Modified Amino Acid: AEF
  SITE 8: note = misc_feature - Modified Amino Acid: 2Nal
  SITE 9: note = misc_feature - Modified Amino Acid: aMeK
  SITE 10: note = misc_feature - Modified Amino Acid: KAc
  SITE 12: note = misc_feature - Modified Amino Acid: aMePhe
  SITE 12: note = Mod_Res - N-terminal is: am
  REGION 1..6: note = Disulfid - Cyclic bond: Pen to Pen
XNTWKXXXKKNF

SEQ ID NO: 251 - protein, 13 aa, synthetic construct
  REGION 1..13: note = Modified peptide: 332dR
  SITE 1: note = Mod_Res - C-terminal is: AzCO
  SITE 1: note = misc_feature - Modified Amino Acid: dR
  SITE 2: note = misc_feature - Modified Amino Acid: Pen
  SITE 5: note = misc_feature - Modified Amino Acid: 7MeW
  SITE 6: note = misc_feature - Modified Amino Acid: KAc
  SITE 7: note = misc_feature - Modified Amino Acid: Pen
  SITE 8: note = misc_feature - Modified Amino Acid: AEF
  SITE 9: note = misc_feature - Modified Amino Acid: 2Nal
  SITE 10: note = misc_feature - Modified Amino Acid: THP
  SITE 13: note = misc_feature - Modified Amino Acid: aMePhe
  SITE 13: note = Mod_Res - N-terminal is: am
  REGION 2..7: note = Disulfid - Cyclic bond: Pen to Pen
RXNTWKXXXXENF

SEQ ID NO: 252 - protein, 13 aa, synthetic construct
  REGION 1..13: note = Modified peptide: 333dR
  SITE 1: note = Mod_Res - C-terminal is: MeSO2
  SITE 1: note = misc_feature - Modified Amino Acid: dR
  SITE 2: note = misc_feature - Modified Amino Acid: Pen
  SITE 5: note = misc_feature - Modified Amino Acid: 7MeW
  SITE 6: note = misc_feature - Modified Amino Acid: KAc
  SITE 7: note = misc_feature - Modified Amino Acid: Pen
  SITE 8: note = misc_feature - Modified Amino Acid: AEF
  SITE 9: note = misc_feature - Modified Amino Acid: 2Nal
  SITE 10: note = misc_feature - Modified Amino Acid: THP
  SITE 13: note = misc_feature - Modified Amino Acid: aMePhe
  SITE 13: note = Mod_Res - N-terminal is: am
  REGION 2..7: note = Disulfid - Cyclic bond: Pen to Pen
RXNTWKXXXXENF

SEQ ID NO: 253 - protein, 14 aa, synthetic construct
  REGION 1..14: note = Modified peptide: 341dR
  SITE 1: note = Mod_Res - C-terminal is: ac
  SITE 1: note = misc_feature - Modified Amino Acid: dR
  SITE 2: note = misc_feature - Modified Amino Acid: Pen
  SITE 5: note = misc_feature - Modified Amino Acid: 7MeW
  SITE 6: note = misc_feature - Modified Amino Acid: KAc
  SITE 7: note = misc_feature - Modified Amino Acid: Pen
  SITE 8: note = misc_feature - Modified Amino Acid: AEF
  SITE 9: note = misc_feature - Modified Amino Acid: 2Nal
  SITE 10: note = misc_feature - Modified Amino Acid: THP
  SITE 14: note = Mod_Res - N-terminal is: am
  REGION 2..7: note = Disulfid - Cyclic bond: Pen to Pen
RXNTWKXXXXENHY

SEQ ID NO: 254 - protein, 14 aa, synthetic construct
  REGION 1..14: note = Modified peptide: 346dR
  SITE 1: note = Mod_Res - C-terminal is: ac
  SITE 1: note = misc_feature - Modified Amino Acid: dR
  SITE 2: note = misc_feature - Modified Amino Acid: Pen
  SITE 5: note = misc_feature - Modified Amino Acid: 7MeW
  SITE 6: note = misc_feature - Modified Amino Acid: KAc
  SITE 7: note = misc_feature - Modified Amino Acid: Pen
  SITE 8: note = misc_feature - Modified Amino Acid: AEF
  SITE 9: note = misc_feature - Modified Amino Acid: 2Nal
  SITE 10: note = misc_feature - Modified Amino Acid: THP
  SITE 14: note = Mod_Res - N-terminal is: am
  REGION 2..7: note = Disulfid - Cyclic bond: Pen to Pen
RXNTWKXXXXENHP

SEQ ID NO: 255 - protein, 14 aa, synthetic construct
  REGION 1..14: note = Modified peptide: 347dR
  SITE 1: note = Mod_Res - C-terminal is: ac
  SITE 1: note = misc_feature - Modified Amino Acid: dR
  SITE 2: note = misc_feature - Modified Amino Acid: Pen
  SITE 5: note = misc_feature - Modified Amino Acid: 7MeW
  SITE 6: note = misc_feature - Modified Amino Acid: KAc
  SITE 7: note = misc_feature - Modified Amino Acid: Pen
  SITE 8: note = misc_feature - Modified Amino Acid: AEF
  SITE 9: note = misc_feature - Modified Amino Acid: 2Nal
  SITE 10: note = misc_feature - Modified Amino Acid: THP
  SITE 14: note = Mod_Res - N-terminal is: am
  REGION 2..7: note = Disulfid - Cyclic bond: Pen to Pen
RXNTWKXXXXENHP

SEQ ID NO: 256 - protein, 13 aa, synthetic construct
  REGION 1..13: note = Modified peptide: 350dR
  SITE 1: note = Mod_Res - C-terminal is: ac
  SITE 1: note = misc_feature - Modified Amino Acid: dR
  SITE 2: note = misc_feature - Modified Amino Acid: Pen
  SITE 7: note = misc_feature - Modified Amino Acid: Pen
  SITE 8: note = misc_feature - Modified Amino Acid: AEF
  SITE 9: note = misc_feature - Modified Amino Acid: 2Nal
  SITE 10: note = misc_feature - Modified Amino Acid: THP
  SITE 13: note = misc_feature - Modified Amino Acid: D(NEtNH2)
  SITE 13: note = Mod_Res - N-terminal is: am
  REGION 2..7: note = Disulfid - Cyclic bond: Pen to Pen
RXQTWQXXXXENX

SEQ ID NO: 257 - protein, 12 aa, synthetic construct
  REGION 1..12: note = Modified peptide: 354
  SITE 1: note = Mod_Res - C-terminal is: ac
  SITE 1: note = misc_feature - Modified Amino Acid: Pen
  SITE 4: note = misc_feature - Modified Amino Acid: 7FW
  SITE 5: note = misc_feature - Modified Amino Acid: KAc
  SITE 6: note = misc_feature - Modified Amino Acid: Pen
  SITE 7: note = misc_feature - Modified Amino Acid: AEF
  SITE 8: note = misc_feature - Modified Amino Acid: 2Nal
  SITE 9: note = misc_feature - Modified Amino Acid: aMeK
  SITE 10: note = misc_feature - Modified Amino Acid: KAc
  SITE 12: note = misc_feature - Modified Amino Acid: aMePhe
  SITE 12: note = Mod_Res - N-terminal is: am
  REGION 1..6: note = Disulfid - Cyclic bond: Pen to Pen
XNTWKXXXKKNF

SEQ ID NO: 258 - protein, 13 aa, synthetic construct
  REGION 1..13: note = Modified peptide: 355dR
  SITE 1: note = Mod_Res - C-terminal is: ac
  SITE 1: note = misc_feature - Modified Amino Acid: dR
  SITE 2: note = misc_feature - Modified Amino Acid: Pen
  SITE 5: note = misc_feature - Modified Amino Acid: 7FW
  SITE 6: note = misc_feature - Modified Amino Acid: KAc
  SITE 7: note = misc_feature - Modified Amino Acid: Pen
  SITE 8: note = misc_feature - Modified Amino Acid: AEF
  SITE 9: note = misc_feature - Modified Amino Acid: 2Nal
  SITE 10: note = misc_feature - Modified Amino Acid: THP
  SITE 13: note = misc_feature - Modified Amino Acid: aMePhe
  SITE 13: note = Mod_Res - N-terminal is: am
  REGION 2..7: note = Disulfid - Cyclic bond: Pen to Pen
RXNTWKXXXXENF

SEQ ID NO: 259 - protein, 12 aa, synthetic construct
  REGION 1..12: note = Modified peptide: 356
  SITE 1: note = Mod_Res - C-terminal is: ac
  SITE 1: note = misc_feature - Modified Amino Acid: Pen
  SITE 4: note = misc_feature - Modified Amino Acid: 7ClW
  SITE 5: note = misc_feature - Modified Amino Acid: KAc
  SITE 6: note = misc_feature - Modified Amino Acid: Pen
  SITE 7: note = misc_feature - Modified Amino Acid: AEF
  SITE 8: note = misc_feature - Modified Amino Acid: 2Nal
  SITE 9: note = misc_feature - Modified Amino Acid: aMeK
  SITE 10: note = misc_feature - Modified Amino Acid: KAc
  SITE 12: note = misc_feature - Modified Amino Acid: aMePhe
  SITE 12: note = Mod_Res - N-terminal is: am
  REGION 1..6: note = Disulfid - Cyclic bond: Pen to Pen
XNTWKXXXKKNF

SEQ ID NO: 260 - protein, 13 aa, synthetic construct
  REGION 1..13: note = Modified peptide: 357dR
  SITE 1: note = Mod_Res - C-terminal is: ac
  SITE 1: note = misc_feature - Modified Amino Acid: dR
  SITE 2: note = misc_feature - Modified Amino Acid: Pen
  SITE 5: note = misc_feature - Modified Amino Acid: 7ClW
  SITE 6: note = misc_feature - Modified Amino Acid: KAc
  SITE 7: note = misc_feature - Modified Amino Acid: Pen
  SITE 8: note = misc_feature - Modified Amino Acid: AEF
  SITE 9: note = misc_feature - Modified Amino Acid: 2Nal
  SITE 10: note = misc_feature - Modified Amino Acid: THP
  SITE 13: note = misc_feature - Modified Amino Acid: aMePhe
  SITE 13: note = Mod_Res - N-terminal is: am
  REGION 2..7: note = Disulfid - Cyclic bond: Pen to Pen
RXNTWKXXXXENF

SEQ ID NO: 261 - protein, 12 aa, synthetic construct
  REGION 1..12: note = Modified peptide: 358
  SITE 1: note = Mod_Res - C-terminal is: ac
  SITE 1: note = misc_feature - Modified Amino Acid: Pen
  SITE 4: note = misc_feature - Modified Amino Acid: 5BrW
  SITE 5: note = misc_feature - Modified Amino Acid: KAc
  SITE 6: note = misc_feature - Modified Amino Acid: Pen
  SITE 7: note = misc_feature - Modified Amino Acid: AEF
  SITE 8: note = misc_feature - Modified Amino Acid: 2Nal
  SITE 9: note = misc_feature - Modified Amino Acid: aMeK
  SITE 10: note = misc_feature - Modified Amino Acid: KAc
  SITE 12: note = misc_feature - Modified Amino Acid: aMePhe
  SITE 12: note = Mod_Res - N-terminal is: am
  REGION 1..6: note = Disulfid - Cyclic bond: Pen to Pen
XNTXKXXXKKNF

SEQ ID NO: 262 - protein, 13 aa, synthetic construct
  REGION 1..13: note = Modified peptide: 359dR
  SITE 1: note = Mod_Res - C-terminal is: ac
  SITE 1: note = misc_feature - Modified Amino Acid: dR
  SITE 2: note = misc_feature - Modified Amino Acid: Pen
  SITE 5: note = misc_feature - Modified Amino Acid: 5BrW
  SITE 6: note = misc_feature - Modified Amino Acid: KAc
  SITE 7: note = misc_feature - Modified Amino Acid: Pen
  SITE 8: note = misc_feature - Modified Amino Acid: AEF
  SITE 9: note = misc_feature - Modified Amino Acid: 2Nal
  SITE 10: note = misc_feature - Modified Amino Acid: THP
  SITE 13: note = misc_feature - Modified Amino Acid: aMePhe
  SITE 13: note = Mod_Res - N-terminal is: am
  REGION 2..7: note = Disulfid - Cyclic bond: Pen to Pen
RXNTXKXXXXENF

SEQ ID NO: 263 - protein, 12 aa, synthetic construct
  REGION 1..12: note = Modified peptide: 360
  SITE 1: note = Mod_Res - C-terminal is: ac
  SITE 1: note = misc_feature - Modified Amino Acid: Pen
  SITE 4: note = misc_feature - Modified Amino Acid: 7MeW
  SITE 5: note = misc_feature - Modified Amino Acid: KAc
  SITE 6: note = misc_feature - Modified Amino Acid: Pen
  SITE 7: note = misc_feature - Modified Amino Acid: AEF
  SITE 8: note = misc_feature - Modified Amino Acid: 2Nal
  SITE 9: note = misc_feature - Modified Amino Acid: aMeK
  SITE 10: note = misc_feature - Modified Amino Acid: KAc
  SITE 12: note = misc_feature - Modified Amino Acid: 3MeH
  SITE 12: note = Mod_Res - N-terminal is: am
  REGION 1..6: note = Disulfid - Cyclic bond: Pen to Pen
XNTWKXXXKKNH

SEQ ID NO: 264 - protein, 13 aa, synthetic construct
  REGION 1..13: note = Modified peptide: 361dR
  SITE 1: note = Mod_Res - C-terminal is: ac
  SITE 1: note = misc_feature - Modified Amino Acid: dR
  SITE 2: note = misc_feature - Modified Amino Acid: Pen
  SITE 5: note = misc_feature - Modified Amino Acid: 7MeW
  SITE 6: note = misc_feature - Modified Amino Acid: KAc
  SITE 7: note = misc_feature - Modified Amino Acid: Pen
  SITE 8: note = misc_feature - Modified Amino Acid: AEF
  SITE 9: note = misc_feature - Modified Amino Acid: 2Nal
  SITE 10: note = misc_feature - Modified Amino Acid: THP
  SITE 13: note = misc_feature - Modified Amino Acid: 3MeH
  SITE 13: note = Mod_Res - N-terminal is: am
  REGION 2..7: note = Disulfid - Cyclic bond: Pen to Pen
RXNTWKXXXXENH

SEQ ID NO: 265 - protein, 12 aa, synthetic construct
  REGION 1..12: note = Modified peptide: 362
  SITE 1: note = Mod_Res - C-terminal is: ac
  SITE 1: note = misc_feature - Modified Amino Acid: Pen
  SITE 4: note = misc_feature - Modified Amino Acid: 7MeW
  SITE 5: note = misc_feature - Modified Amino Acid: KAc
  SITE 6: note = misc_feature - Modified Amino Acid: Pen
  SITE 7: note = misc_feature - Modified Amino Acid: AEF
  SITE 8: note = misc_feature - Modified Amino Acid: 2Nal
  SITE 9: note = misc_feature - Modified Amino Acid: aMeK
  SITE 10: note = misc_feature - Modified Amino Acid: KAc
  SITE 12: note = misc_feature - Modified Amino Acid: 1MeH
  SITE 12: note = Mod_Res - N-terminal is: am
  REGION 1..6: note = Disulfid - Cyclic bond: Pen to Pen
XNTWKXXXKKNH

SEQ ID NO: 266 - protein, 13 aa, synthetic construct
  REGION 1..13: note = Modified peptide: 363dR
  SITE 1: note = Mod_Res - C-terminal is: ac
  SITE 1: note = misc_feature - Modified Amino Acid: dR
  SITE 2: note = misc_feature - Modified Amino Acid: Pen
  SITE 5: note = misc_feature - Modified Amino Acid: 7MeW
  SITE 6: note = misc_feature - Modified Amino Acid: KAc
  SITE 7: note = misc_feature - Modified Amino Acid: Pen
  SITE 8: note = misc_feature - Modified Amino Acid: AEF
  SITE 9: note = misc_feature - Modified Amino Acid: 2Nal
  SITE 10: note = misc_feature - Modified Amino Acid: THP
  SITE 13: note = misc_feature - Modified Amino Acid: 1MeH
  SITE 13: note = Mod_Res - N-terminal is: am
  REGION 2..7: note = Disulfid - Cyclic bond: Pen to Pen
RXNTWKXXXXENH

SEQ ID NO: 267 - protein, 12 aa, synthetic construct
  REGION 1..12: note = Modified peptide: 364
  SITE 1: note = Mod_Res - C-terminal is: NH2
  SITE 1: note = misc_feature - Modified Amino Acid: Pen
  SITE 4: note = misc_feature - Modified Amino Acid: 7MeW
  SITE 5: note = misc_feature - Modified Amino Acid: KAc
  SITE 6: note = misc_feature - Modified Amino Acid: Pen
  SITE 7: note = misc_feature - Modified Amino Acid: AEF(Boc)
  SITE 8: note = misc_feature - Modified Amino Acid: 2Nal
  SITE 9: note = misc_feature - Modified Amino Acid: aMeK(Boc)
  SITE 10: note = misc_feature - Modified Amino Acid: KAc
  SITE 12: note = misc_feature - Modified Amino Acid: aMePhe
  SITE 12: note = Mod_Res - N-terminal is: am
  REGION 1..6: note = Disulfid - Cyclic bond: Pen to Pen
XNTWKXXXXKNF

SEQ ID NO: 268 - protein, 13 aa, synthetic construct
  REGION 1..13: note = Modified peptide: 365dR
  SITE 1: note = Mod_Res - C-terminal is: NH2
  SITE 1: note = misc_feature - Modified Amino Acid: dR
  SITE 2: note = misc_feature - Modified Amino Acid: Pen
  SITE 5: note = misc_feature - Modified Amino Acid: 7MeW
  SITE 6: note = misc_feature - Modified Amino Acid: KAc
  SITE 7: note = misc_feature - Modified Amino Acid: Pen
  SITE 8: note = misc_feature - Modified Amino Acid: AEF(Boc)
  SITE 9: note = misc_feature - Modified Amino Acid: 2Nal
  SITE 10: note = misc_feature - Modified Amino Acid: THP
  SITE 13: note = misc_feature - Modified Amino Acid: aMePhe
  SITE 13: note = Mod_Res - N-terminal is: am
  REGION 2..7: note = Disulfid - Cyclic bond: Pen to Pen
RXNTWKXXXXENF

SEQ ID NO: 269 - protein, 12 aa, synthetic construct
  REGION 1..12: note = Modified peptide: 368
  SITE 1: note = Mod_Res - C-terminal is: BHCO
  SITE 1: note = misc_feature - Modified Amino Acid: Pen
  SITE 4: note = misc_feature - Modified Amino Acid: 7MeW
  SITE 5: note = misc_feature - Modified Amino Acid: KAc
  SITE 6: note = misc_feature - Modified Amino Acid: Pen
  SITE 7: note = misc_feature - Modified Amino Acid: AEF
  SITE 8: note = misc_feature - Modified Amino Acid: 2Nal
  SITE 9: note = misc_feature - Modified Amino Acid: aMeK
  SITE 10: note = misc_feature - Modified Amino Acid: KAc
  SITE 12: note = misc_feature - Modified Amino Acid: aMePhe
  SITE 12: note = Mod_Res - N-terminal is: am
  REGION 1..6: note = Disulfid - Cyclic bond: Pen to Pen
XNTWKXXXKKNF

SEQ ID NO: 270 - protein, 13 aa, synthetic construct
  REGION 1..13: note = Modified peptide: 369dR
  SITE 1: note = Mod_Res - C-terminal is: BHCO
  SITE 1: note = misc_feature - Modified Amino Acid: dR
  SITE 2: note = misc_feature - Modified Amino Acid: Pen
  SITE 5: note = misc_feature - Modified Amino Acid: 7MeW
  SITE 6: note = misc_feature - Modified Amino Acid: KAc
  SITE 7: note = misc_feature - Modified Amino Acid: Pen
  SITE 8: note = misc_feature - Modified Amino Acid: AEF
  SITE 9: note = misc_feature - Modified Amino Acid: 2Nal
  SITE 10: note = misc_feature - Modified Amino Acid: THP
  SITE 13: note = misc_feature - Modified Amino Acid: aMePhe
  SITE 13: note = Mod_Res - N-terminal is: am
  REGION 2..7: note = Disulfid - Cyclic bond: Pen to Pen
RXNTWKXXXXENF

SEQ ID NO: 271 - protein, 13 aa, synthetic construct
  REGION 1..13: note = Modified peptide: 373
  SITE 1: note = Mod_Res - C-terminal is: ac
  SITE 1: note = misc_feature - Modified Amino Acid: Pen
  SITE 4: note = misc_feature - Modified Amino Acid: 7MeW
  SITE 5: note = misc_feature - Modified Amino Acid: KAc
  SITE 6: note = misc_feature - Modified Amino Acid: Pen
  SITE 7: note = misc_feature - Modified Amino Acid: AEF
  SITE 8: note = misc_feature - Modified Amino Acid: 2Nal
  SITE 9: note = misc_feature - Modified Amino Acid: Acpx
  SITE 12: note = misc_feature - Modified Amino Acid: dPaf
  SITE 13: note = misc_feature - Modified Amino Acid: MeGly
  SITE 13: note = Mod_Res - N-terminal is: am
  REGION 1..6: note = Disulfid - Cyclic bond: Pen to Pen
XNTWKXXXXENXG

SEQ ID NO: 272 - protein, 13 aa, synthetic construct
  REGION 1..13: note = Modified peptide: 374dR
  SITE 1: note = Mod_Res - C-terminal is: ac
  SITE 1: note = misc_feature - Modified Amino Acid: dR
  SITE 2: note = misc_feature - Modified Amino Acid: Pen
  SITE 5: note = misc_feature - Modified Amino Acid: 7MeW
  SITE 6: note = misc_feature - Modified Amino Acid: KAc
  SITE 7: note = misc_feature - Modified Amino Acid: Pen
  SITE 8: note = misc_feature - Modified Amino Acid: AEF
  SITE 9: note = misc_feature - Modified Amino Acid: 2Nal
  SITE 10: note = misc_feature - Modified Amino Acid: THP
  SITE 13: note = Mod_Res - N-terminal is: am
  REGION 2..7: note = Disulfid - Cyclic bond: Pen to Pen
RXNTWKXXXXENH

SEQ ID NO: 273 - protein, 12 aa, synthetic construct
  REGION 1..12: note = Modified peptide: 375
  SITE 1: note = Mod_Res - C-terminal is: ac
  SITE 1: note = misc_feature - Modified Amino Acid: Pen
  SITE 4: note = misc_feature - Modified Amino Acid: 7MeW
  SITE 5: note = misc_feature - Modified Amino Acid: KAc
  SITE 6: note = misc_feature - Modified Amino Acid: Pen
  SITE 7: note = misc_feature - Modified Amino Acid: AEF
  SITE 8: note = misc_feature - Modified Amino Acid: 2Nal
  SITE 9: note = misc_feature - Modified Amino Acid: aMeK
  SITE 10: note = misc_feature - Modified Amino Acid: KAc
  SITE 12: note = Mod_Res - N-terminal is: CONHMe
  REGION 1..6: note = Disulfid - Cyclic bond: Pen to Pen
XNTWKXXXKKNH

SEQ ID NO: 274 - protein, 13 aa, synthetic construct
  REGION 1..13: note = Modified peptide: 386dR
  SITE 1: note = Mod_Res - C-terminal is: ac
  SITE 1: note = misc_feature - Modified Amino Acid: dR
  SITE 2: note = misc_feature - Modified Amino Acid: Pen
  SITE 5: note = misc_feature - Modified Amino Acid: 7MeW
  SITE 6: note = misc_feature - Modified Amino Acid: KAc
  SITE 7: note = misc_feature - Modified Amino Acid: Pen
  SITE 8: note = misc_feature - Modified Amino Acid: AEF
  SITE 9: note = misc_feature - Modified Amino Acid: 2Nal
  SITE 10: note = misc_feature - Modified Amino Acid: aMeK
  SITE 13: note = Mod_Res - N-terminal is: CONHMe
  REGION 2..7: note = Disulfid - Cyclic bond: Pen to Pen
RXNTWKXXXKENH

SEQ ID NO: 275 - protein, 13 aa, synthetic construct
  REGION 1..13: note = Modified peptide: 391
  SITE 1: note = Mod_Res - C-terminal is: ac
  SITE 1: note = misc_feature - Modified Amino Acid: Pen
  SITE 4: note = misc_feature - Modified Amino Acid: 7PhW
  SITE 5: note = misc_feature - Modified Amino Acid: KAc
  SITE 6: note = misc_feature - Modified Amino Acid: Pen
  SITE 7: note = misc_feature - Modified Amino Acid: AEF
  SITE 8: note = misc_feature - Modified Amino Acid: 2Nal
  SITE 9: note = misc_feature - Modified Amino Acid: aMeK
  SITE 10: note = misc_feature - Modified Amino Acid: KAc
  SITE 12: note = misc_feature - Modified Amino Acid: 3Pya
  SITE 13: note = misc_feature - Modified Amino Acid: MeGly
  SITE 13: note = Mod_Res - N-terminal is: am
  REGION 1..6: note = Disulfid - Cyclic bond: Pen to Pen
XNTWKXXXKKNXG

SEQ ID NO: 276 - protein, 13 aa, synthetic construct
  REGION 1..13: note = Modified peptide: 392
  SITE 1: note = Mod_Res - C-terminal is: ac
  SITE 1: note = misc_feature - Modified Amino Acid: Pen
  SITE 4: note = misc_feature - Modified Amino Acid: 7PhW
  SITE 5: note = misc_feature - Modified Amino Acid: KAc
  SITE 6: note = misc_feature - Modified Amino Acid: Pen
  SITE 7: note = misc_feature - Modified Amino Acid: AEF
  SITE 8: note = misc_feature - Modified Amino Acid: 2Nal
  SITE 9: note = misc_feature - Modified Amino Acid: THP
  SITE 12: note = misc_feature - Modified Amino Acid: 3Pya
  SITE 13: note = misc_feature - Modified Amino Acid: MeGly
  SITE 13: note = Mod_Res - N-terminal is: am
  REGION 1..6: note = Disulfid - Cyclic bond: Pen to Pen
XNTWKXXXXENXG

SEQ ID NO: 277 - protein, 13 aa, synthetic construct
  REGION 1..13: note = Modified peptide: 393
  SITE 1: note = Mod_Res - C-terminal is: ac
  SITE 1: note = misc_feature - Modified Amino Acid: Pen
  SITE 4: note = misc_feature - Modified Amino Acid: 7MeW
  SITE 5: note = misc_feature - Modified Amino Acid: KAc
  SITE 6: note = misc_feature - Modified Amino Acid: Pen
  SITE 7: note = misc_feature - Modified Amino Acid: AEF
  SITE 8: note = misc_feature - Modified Amino Acid: 2Nal
  SITE 9: note = misc_feature - Modified Amino Acid: aMeK
  SITE 10: note = misc_feature - Modified Amino Acid: KAc
  SITE 12: note = misc_feature - Modified Amino Acid: 3Pya
  SITE 13: note = misc_feature - Modified Amino Acid: MeGly
  SITE 13: note = Mod_Res - N-terminal is: am
  REGION 1..6: note = Disulfid - Cyclic bond: Pen to Pen
XNTWKXXXKKNXG

SEQ ID NO: 278 - protein, 13 aa, synthetic construct
  REGION 1..13: note = Modified peptide: 399
  SITE 1: note = Mod_Res - C-terminal is: ac
  SITE 1: note = misc_feature - Modified Amino Acid: Pen
  SITE 4: note = misc_feature - Modified Amino Acid: 7MeW
  SITE 5: note = misc_feature - Modified Amino Acid: KAc
  SITE 6: note = misc_feature - Modified Amino Acid: Pen
  SITE 7: note = misc_feature - Modified Amino Acid: AEF
  SITE 8: note = misc_feature - Modified Amino Acid: 2Nal
  SITE 9: note = misc_feature - Modified Amino Acid: THP
  SITE 12: note = misc_feature - Modified Amino Acid: 3Pya
  SITE 13: note = misc_feature - Modified Amino Acid: MeGly
  SITE 13: note = Mod_Res - N-terminal is: am
  REGION 1..6: note = Disulfid - Cyclic bond: Pen to Pen
XNTWKXXXXENXG

SEQ ID NO: 279 - protein, 14 aa, synthetic construct
  REGION 1..14: note = Modified peptide: 411dR
  SITE 1: note = Mod_Res - C-terminal is: ac
  SITE 1: note = misc_feature - Modified Amino Acid: dR
  SITE 2: note = misc_feature - Modified Amino Acid: Pen
  SITE 5: note = misc_feature - Modified Amino Acid: 7MeW
  SITE 6: note = misc_feature - Modified Amino Acid: KAc
  SITE 7: note = misc_feature - Modified Amino Acid: Pen
  SITE 8: note = misc_feature - Modified Amino Acid: AEF
  SITE 9: note = misc_feature - Modified Amino Acid: 2Nal
  SITE 10: note = misc_feature - Modified Amino Acid: THP
  SITE 13: note = misc_feature - Modified Amino Acid: THP
  SITE 14: note = Mod_Res - N-terminal is: am
  REGION 2..7: note = Disulfid - Cyclic bond: Pen to Pen
RXNTWKXXXXENXP

SEQ ID NO: 280 - protein, 14 aa, synthetic construct
  REGION 1..14: note = Modified peptide: 412dR
  SITE 1: note = Mod_Res - C-terminal is: ac
  SITE 1: note = misc_feature - Modified Amino Acid: dR
  SITE 2: note = misc_feature - Modified Amino Acid: Pen
  SITE 5: note = misc_feature - Modified Amino Acid: 7MeW
  SITE 6: note = misc_feature - Modified Amino Acid: KAc
  SITE 7: note = misc_feature - Modified Amino Acid: Pen
  SITE 8: note = misc_feature - Modified Amino Acid: AEF
  SITE 9: note = misc_feature - Modified Amino Acid: 2Nal
  SITE 10: note = misc_feature - Modified Amino Acid: THP
  SITE 13: note = misc_feature - Modified Amino Acid: THP
  SITE 14: note = Mod_Res - N-terminal is: am
  REGION 2..7: note = Disulfid - Cyclic bond: Pen to Pen
RXNTWKXXXXENXP

SEQ ID NO: 281 - protein, 14 aa, synthetic construct
  REGION 1..14: note = Modified peptide: 413dR
  SITE 1: note = Mod_Res - C-terminal is: ac
  SITE 1: note = misc_feature - Modified Amino Acid: dR
  SITE 2: note = misc_feature - Modified Amino Acid: Pen
  SITE 5: note = misc_feature - Modified Amino Acid: 7MeW
  SITE 6: note = misc_feature - Modified Amino Acid: KAc
  SITE 7: note = misc_feature - Modified Amino Acid: Pen
  SITE 8: note = misc_feature - Modified Amino Acid: AEF
  SITE 9: note = misc_feature - Modified Amino Acid: 2Nal
  SITE 10: note = misc_feature - Modified Amino Acid: Acpx
  SITE 13: note = misc_feature - Modified Amino Acid: bAla
  SITE 14: note = misc_feature - Modified Amino Acid: MeGly
  SITE 14: note = Mod_Res - N-terminal is: am
  REGION 2..7: note = Disulfid - Cyclic bond: Pen to Pen
RXNTWKXXXXENAG

SEQ ID NO: 282 - protein, 14 aa, synthetic construct
  REGION 1..14: note = Modified peptide: 414dR
  SITE 1: note = Mod_Res - C-terminal is: ac
  SITE 1: note = misc_feature - Modified Amino Acid: dR
  SITE 2: note = misc_feature - Modified Amino Acid: Pen
  SITE 5: note = misc_feature - Modified Amino Acid: 7MeW
  SITE 6: note = misc_feature - Modified Amino Acid: KAc
  SITE 7: note = misc_feature - Modified Amino Acid: Pen
  SITE 8: note = misc_feature - Modified Amino Acid: AEF
  SITE 9: note = misc_feature - Modified Amino Acid: 2Nal
  SITE 10: note = misc_feature - Modified Amino Acid: Acpx
  SITE 14: note = misc_feature - Modified Amino Acid: MeGly
  SITE 14: note = Mod_Res - N-terminal is: am
  REGION 2..7: note = Disulfid - Cyclic bond: Pen to Pen
RXNTWKXXXXENVG

SEQ ID NO: 283 - protein, 14 aa, synthetic construct
  REGION 1..14: note = Modified peptide: 415dR
  SITE 1: note = Mod_Res - C-terminal is: ac
  SITE 1: note = misc_feature - Modified Amino Acid: dR
  SITE 2: note = misc_feature - Modified Amino Acid: Pen
  SITE 5: note = misc_feature - Modified Amino Acid: 7MeW
  SITE 6: note = misc_feature - Modified Amino Acid: KAc
  SITE 7: note = misc_feature - Modified Amino Acid: Pen
  SITE 8: note = misc_feature - Modified Amino Acid: AEF
  SITE 9: note = misc_feature - Modified Amino Acid: 2Nal
  SITE 10: note = misc_feature - Modified Amino Acid: Acpx
  SITE 13: note = misc_feature - Modified Amino Acid: dR
  SITE 14: note = misc_feature - Modified Amino Acid: MeGly
  SITE 14: note = Mod_Res - N-terminal is: am
  REGION 2..7: note = Disulfid - Cyclic bond: Pen to Pen
RXNTWKXXXXENRG

SEQ ID NO: 284 - protein, 14 aa, synthetic construct
  REGION 1..14: note = Modified peptide: 416dR
  SITE 1: note = Mod_Res - C-terminal is: ac
  SITE 1: note = misc_feature - Modified Amino Acid: dR
  SITE 2: note = misc_feature - Modified Amino Acid: Pen
  SITE 5: note = misc_feature - Modified Amino Acid: 7MeW
  SITE 6: note = misc_feature - Modified Amino Acid: KAc
  SITE 7: note = misc_feature - Modified Amino Acid: Pen
  SITE 8: note = misc_feature - Modified Amino Acid: AEF
  SITE 9: note = misc_feature - Modified Amino Acid: 2Nal
  SITE 10: note = misc_feature - Modified Amino Acid: Acpx
  SITE 13: note = misc_feature - Modified Amino Acid: hF
  SITE 14: note = misc_feature - Modified Amino Acid: MeGly
  SITE 14: note = Mod_Res - N-terminal is: am
  REGION 2..7: note = Disulfid - Cyclic bond: Pen to Pen
RXNTWKXXXXENFG

SEQ ID NO: 285 - protein, 13 aa, synthetic construct
  REGION 1..13: note = Modified peptide: 420
  SITE 1: note = Mod_Res - C-terminal is: ac
  SITE 1: note = misc_feature - Modified Amino Acid: Pen
  SITE 4: note = misc_feature - Modified Amino Acid: 7MeW
  SITE 5: note = misc_feature - Modified Amino Acid: KAc
  SITE 6: note = misc_feature - Modified Amino Acid: Pen
  SITE 7: note = misc_feature - Modified Amino Acid: AEF
  SITE 8: note = misc_feature - Modified Amino Acid: 2Nal
  SITE 9: note = misc_feature - Modified Amino Acid: Acpx
  SITE 12: note = misc_feature - Modified Amino Acid: PAF
  SITE 13: note = misc_feature - Modified Amino Acid: MeGly
  SITE 13: note = Mod_Res - N-terminal is: am
  REGION 1..6: note = Disulfid - Cyclic bond: Pen to Pen
XNTWKXXXXENXG

SEQ ID NO: 286 - protein, 14 aa, synthetic construct
  REGION 1..14: note = Modified peptide: 421dR
  SITE 1: note = Mod_Res - C-terminal is: ac
  SITE 1: note = misc_feature - Modified Amino Acid: dR
  SITE 2: note = misc_feature - Modified Amino Acid: Pen
  SITE 5: note = misc_feature - Modified Amino Acid: 7MeW
  SITE 6: note = misc_feature - Modified Amino Acid: KAc
  SITE 7: note = misc_feature - Modified Amino Acid: Pen
  SITE 8: note = misc_feature - Modified Amino Acid: AEF
  SITE 9: note = misc_feature - Modified Amino Acid: 2Nal
  SITE 10: note = misc_feature - Modified Amino Acid: Acpx
  SITE 13: note = misc_feature - Modified Amino Acid: PAF
  SITE 14: note = misc_feature - Modified Amino Acid: MeGly
  SITE 14: note = Mod_Res - N-terminal is: am
  REGION 2..7: note = Disulfid - Cyclic bond: Pen to Pen
RXNTWKXXXXENXG

SEQ ID NO: 287 - protein, 14 aa, synthetic construct
  REGION 1..14: note = Modified peptide: 425dR
  SITE 1: note = Mod_Res - C-terminal is: ac
  SITE 1: note = misc_feature - Modified Amino Acid: dR
  SITE 2: note = misc_feature - Modified Amino Acid: Pen
  SITE 5: note = misc_feature - Modified Amino Acid: 7MeW
  SITE 6: note = misc_feature - Modified Amino Acid: KAc
  SITE 7: note = misc_feature - Modified Amino Acid: Pen
  SITE 8: note = misc_feature - Modified Amino Acid: AEF
  SITE 9: note = misc_feature - Modified Amino Acid: 2Nal
  SITE 10: note = misc_feature - Modified Amino Acid: Acpx
  SITE 14: note = misc_feature - Modified Amino Acid: MeGly
  SITE 14: note = Mod_Res - N-terminal is: am
  REGION 2..7: note = Disulfid - Cyclic bond: Pen to Pen
RXNTWKXXXXENFG

SEQ ID NO: 288 - protein, 14 aa, synthetic construct
  REGION 1..14: note = Modified peptide: 426dR
  SITE 1: note = Mod_Res - C-terminal is: ac
  SITE 1: note = misc_feature - Modified Amino Acid: dR
  SITE 2: note = misc_feature - Modified Amino Acid: Pen
  SITE 5: note = misc_feature - Modified Amino Acid: 7MeW
  SITE 6: note = misc_feature - Modified Amino Acid: KAc
  SITE 7: note = misc_feature - Modified Amino Acid: Pen
  SITE 8: note = misc_feature - Modified Amino Acid: AEF
  SITE 9: note = misc_feature - Modified Amino Acid: 2Nal
  SITE 10: note = misc_feature - Modified Amino Acid: Acpx
  SITE 14: note = misc_feature - Modified Amino Acid: paf
  SITE 14: note = Mod_Res - N-terminal is: am
  REGION 2..7: note = Disulfid - Cyclic bond: Pen to Pen
RXNTWKXXXXENHX

SEQ ID NO: 289 - protein, 12 aa, synthetic construct
  REGION 1..12: note = Modified peptide: 434
  SITE 1: note = Mod_Res - C-terminal is: FPrpTriazoleMeCO
  SITE 1: note = misc_feature - Modified Amino Acid: Pen
  SITE 4: note = misc_feature - Modified Amino Acid: 7MeW
  SITE 5: note = misc_feature - Modified Amino Acid: KAc
  SITE 6: note = misc_feature - Modified Amino Acid: Pen
  SITE 7: note = misc_feature - Modified Amino Acid: AEF
  SITE 8: note = misc_feature - Modified Amino Acid: 2Nal
  SITE 9: note = misc_feature - Modified Amino Acid: aMeK
  SITE 10: note = misc_feature - Modified Amino Acid: KAc
  SITE 12: note = misc_feature - Modified Amino Acid: aMePhe
  SITE 12: note = Mod_Res - N-terminal is: am
  REGION 1..6: note = Disulfid - Cyclic bond: Pen to Pen
XNTWKXXXKKNF

SEQ ID NO: 290 - protein, 13 aa, synthetic construct
  REGION 1..13: note = Modified peptide: 435dR
  SITE 1: note = Mod_Res - C-terminal is: FPrpTriazoleMeCO
  SITE 1: note = misc_feature - Modified Amino Acid: dR
  SITE 2: note = misc_feature - Modified Amino Acid: Pen
  SITE 5: note = misc_feature - Modified Amino Acid: 7MeW
  SITE 6: note = misc_feature - Modified Amino Acid: KAc
  SITE 7: note = misc_feature - Modified Amino Acid: Pen
  SITE 8: note = misc_feature - Modified Amino Acid: AEF
  SITE 9: note = misc_feature - Modified Amino Acid: 2Nal
  SITE 10: note = misc_feature - Modified Amino Acid: THP
  SITE 13: note = misc_feature - Modified Amino Acid: aMePhe
  SITE 13: note = Mod_Res - N-terminal is: am
  REGION 2..7: note = Disulfid - Cyclic bond: Pen to Pen
RXNTWKXXXXENF

SEQ ID NO: 291 - protein, 12 aa, synthetic construct
  REGION 1..12: note = Modified peptide: 436
  SITE 1: note = Mod_Res - C-terminal is: ac
  SITE 1: note = misc_feature - Modified Amino Acid: Pen
  SITE 4: note = misc_feature - Modified Amino Acid: 7MeW
  SITE 5: note = misc_feature - Modified Amino Acid: KAc
  SITE 6: note = misc_feature - Modified Amino Acid: Pen
  SITE 7: note = misc_feature - Modified Amino Acid: 4PipPhe
  SITE 8: note = misc_feature - Modified Amino Acid: 2Nal
  SITE 9: note = misc_feature - Modified Amino Acid: aMeK
  SITE 10: note = misc_feature - Modified Amino Acid: KAc
  SITE 12: note = misc_feature - Modified Amino Acid: aMePhe
  SITE 12: note = Mod_Res - N-terminal is: am
  REGION 1..6: note = Disulfid - Cyclic bond: Pen to Pen
XNTWKXXXKKNF

SEQ ID NO: 292 - protein, 13 aa, synthetic construct
  REGION 1..13: note = Modified peptide: 437dR
  SITE 1: note = Mod_Res - C-terminal is: ac
  SITE 1: note = misc_feature - Modified Amino Acid: dR
  SITE 2: note = misc_feature - Modified Amino Acid: Pen
  SITE 5: note = misc_feature - Modified Amino Acid: 7MeW
  SITE 6: note = misc_feature - Modified Amino Acid: KAc
  SITE 7: note = misc_feature - Modified Amino Acid: Pen
  SITE 8: note = misc_feature - Modified Amino Acid: 4PipPhe
  SITE 9: note = misc_feature - Modified Amino Acid: 2Nal
  SITE 10: note = misc_feature - Modified Amino Acid: THP
  SITE 13: note = misc_feature - Modified Amino Acid: aMePhe
  SITE 13: note = Mod_Res - N-terminal is: am
  REGION 2..7: note = Disulfid - Cyclic bond: Pen to Pen
RXNTWKXXXXENF

SEQ ID NO: 293 - protein, 12 aa, synthetic construct
  REGION 1..12: note = Modified peptide: 438
  SITE 1: note = Mod_Res - C-terminal is: ac
  SITE 1: note = misc_feature - Modified Amino Acid: Pen
  SITE 4: note = misc_feature - Modified Amino Acid: 7MeW
  SITE 5: note = misc_feature - Modified Amino Acid: KAc
  SITE 6: note = misc_feature - Modified Amino Acid: Pen
  SITE 7: note = misc_feature - Modified Amino Acid: AEF
  SITE 8: note = misc_feature - Modified Amino Acid: 2Nal
  SITE 9: note = misc_feature - Modified Amino Acid: aMeK
  SITE 10: note = misc_feature - Modified Amino Acid: KAc
  SITE 12: note = misc_feature - Modified Amino Acid: tetraFPhe
  SITE 12: note = Mod_Res - N-terminal is: am
  REGION 1..6: note = Disulfid - Cyclic bond: Pen to Pen
XNTWKXXXKKNX

SEQ ID NO: 294 - protein, 13 aa, synthetic construct
  REGION 1..13: note = Modified peptide: 439dR
  SITE 1: note = Mod_Res - C-terminal is: ac
  SITE 1: note = misc_feature - Modified Amino Acid: dR
  SITE 2: note = misc_feature - Modified Amino Acid: Pen
  SITE 5: note = misc_feature - Modified Amino Acid: 7MeW
  SITE 6: note = misc_feature - Modified Amino Acid: KAc
  SITE 7: note = misc_feature - Modified Amino Acid: Pen
  SITE 8: note = misc_feature - Modified Amino Acid: AEF
  SITE 9: note = misc_feature - Modified Amino Acid: 2Nal
  SITE 10: note = misc_feature - Modified Amino Acid: THP
  SITE 13: note = misc_feature - Modified Amino Acid: tetraFPhe
  SITE 13: note = Mod_Res - N-terminal is: am
  REGION 2..7: note = Disulfid - Cyclic bond: Pen to Pen
RXNTWKXXXXENX

SEQ ID NO: 295 - protein, 12 aa, synthetic construct
  REGION 1..12: note = Modified peptide: 440
  SITE 1: note = Mod_Res - C-terminal is: ac
  SITE 1: note = misc_feature - Modified Amino Acid: Pen
  SITE 4: note = misc_feature - Modified Amino Acid: 7MeW
  SITE 5: note = misc_feature - Modified Amino Acid: KAc
  SITE 6: note = misc_feature - Modified Amino Acid: Pen
  SITE 7: note = misc_feature - Modified Amino Acid: AEF
  SITE 8: note = misc_feature - Modified Amino Acid: 2Nal
  SITE 9: note = misc_feature - Modified Amino Acid: aMeK
  SITE 10: note = misc_feature - Modified Amino Acid: KAc
  SITE 12: note = misc_feature - Modified Amino Acid: bMePhe(SR)
  SITE 12: note = Mod_Res - N-terminal is: am
  REGION 1..6: note = Disulfid - Cyclic bond: Pen to Pen
XNTWKXXXKKNX

SEQ ID NO: 296 - protein, 12 aa, synthetic construct
  REGION 1..12: note = Modified peptide: 441
  SITE 1: note = Mod_Res - C-terminal is: ac
  SITE 1: note = misc_feature - Modified Amino Acid: Pen
  SITE 4: note = misc_feature - Modified Amino Acid: 7MeW
  SITE 5: note = misc_feature - Modified Amino Acid: KAc
  SITE 6: note = misc_feature - Modified Amino Acid: Pen
  SITE 7: note = misc_feature - Modified Amino Acid: AEF
  SITE 8: note = misc_feature - Modified Amino Acid: 2Nal
  SITE 9: note = misc_feature - Modified Amino Acid: aMeK
  SITE 10: note = misc_feature - Modified Amino Acid: KAc
  SITE 12: note = misc_feature - Modified Amino Acid: 5PyrimidAla
  SITE 12: note = Mod_Res - N-terminal is: am
  REGION 1..6: note = Disulfid - Cyclic bond: Pen to Pen
XNTWKXXXKKNX

SEQ ID NO: 297 - protein, 13 aa, synthetic construct
  REGION 1..13: note = Modified peptide: 442dR
  SITE 1: note = Mod_Res - C-terminal is: ac
  SITE 1: note = misc_feature - Modified Amino Acid: dR
  SITE 2: note = misc_feature - Modified Amino Acid: Pen
  SITE 5: note = misc_feature - Modified Amino Acid: 7MeW
  SITE 6: note = misc_feature - Modified Amino Acid: KAc
  SITE 7: note = misc_feature - Modified Amino Acid: Pen
  SITE 8: note = misc_feature - Modified Amino Acid: AEF
  SITE 9: note = misc_feature - Modified Amino Acid: 2Nal
  SITE 10: note = misc_feature - Modified Amino Acid: THP
  SITE 13: note = misc_feature - Modified Amino Acid: bMePhe(SR)
  SITE 13: note = Mod_Res - N-terminal is: am
  REGION 2..7: note = Disulfid - Cyclic bond: Pen to Pen
RXNTWKXXXXENX

SEQ ID NO: 298 - protein, 13 aa, synthetic construct
  REGION 1..13: note = Modified peptide: 443dR
  SITE 1: note = Mod_Res - C-terminal is: ac
  SITE 1: note = misc_feature - Modified Amino Acid: dR
  SITE 2: note = misc_feature - Modified Amino Acid: Pen
  SITE 5: note = misc_feature - Modified Amino Acid: 7MeW
  SITE 6: note = misc_feature - Modified Amino Acid: KAc
  SITE 7: note = misc_feature - Modified Amino Acid: Pen
  SITE 8: note = misc_feature - Modified Amino Acid: AEF
  SITE 9: note = misc_feature - Modified Amino Acid: 2Nal
  SITE 10: note = misc_feature - Modified Amino Acid: THP
  SITE 13: note = misc_feature - Modified Amino Acid: 5PyrimidAla
  SITE 13: note = Mod_Res - N-terminal is: am
  REGION 2..7: note = Disulfid - Cyclic bond: Pen to Pen
RXNTWKXXXXENX

SEQ ID NO: 299 - protein, 13 aa, synthetic construct
  REGION 1..13: note = Modified peptide: 446dR
  SITE 1: note = Mod_Res - C-terminal is: ac
  SITE 1: note = misc_feature - Modified Amino Acid: dR
  SITE 2: note = misc_feature - Modified Amino Acid: Pen
  SITE 5: note = misc_feature - Modified Amino Acid: 7MeW
  SITE 6: note = misc_feature - Modified Amino Acid: KAc
  SITE 7: note = misc_feature - Modified Amino Acid: Pen
  SITE 8: note = misc_feature - Modified Amino Acid: AEF(BH)
  SITE 9: note = misc_feature - Modified Amino Acid: 2Nal
  SITE 10: note = misc_feature - Modified Amino Acid: THP
  SITE 13: note = misc_feature - Modified Amino Acid: aMePhe
  SITE 13: note = Mod_Res - N-terminal is: am
  REGION 2..7: note = Disulfid - Cyclic bond: Pen to Pen
RXNTWKXXXXENF

SEQ ID NO: 300 - protein, 13 aa, synthetic construct
  REGION 1..13: note = Modified peptide: 447dR
  SITE 1: note = Mod_Res - C-terminal is: ac
  SITE 1: note = misc_feature - Modified Amino Acid: dR
  SITE 2: note = misc_feature - Modified Amino Acid: Pen
  SITE 5: note = misc_feature - Modified Amino Acid: 7MeW
  SITE 6: note = misc_feature - Modified Amino Acid: KAc
  SITE 7: note = misc_feature - Modified Amino Acid: Pen
  SITE 8: note = misc_feature - Modified Amino Acid: AEF(SMSB)
  SITE 9: note = misc_feature - Modified Amino Acid: 2Nal
  SITE 10: note = misc_feature - Modified Amino Acid: THP
  SITE 13: note = misc_feature - Modified Amino Acid: aMePhe
  SITE 13: note = Mod_Res - N-terminal is: am
  REGION 2..7: note = Disulfid - Cyclic bond: Pen to Pen
RXNTWKXXXXENF

SEQ ID NO: 301 - protein, 13 aa, synthetic construct
  REGION 1..13: note = Modified peptide: 453
  SITE 1: note = Mod_Res - C-terminal is: ac
  SITE 1: note = misc_feature - Modified Amino Acid: Pen
  SITE 4: note = misc_feature - Modified Amino Acid: 7PhW
  SITE 5: note = misc_feature - Modified Amino Acid: KAc
  SITE 6: note = misc_feature - Modified Amino Acid: Pen
  SITE 7: note = misc_feature - Modified Amino Acid: AEF
  SITE 8: note = misc_feature - Modified Amino Acid: 2Nal
  SITE 9: note = misc_feature - Modified Amino Acid: THP
  SITE 10: note = misc_feature - Modified Amino Acid: KAc
  SITE 12: note = misc_feature - Modified Amino Acid: 3Pya
  SITE 13: note = misc_feature - Modified Amino Acid: MeGly
  SITE 13: note = Mod_Res - N-terminal is: am
  REGION 1..6: note = Disulfid - Cyclic bond: Pen to Pen
XNTWKXXXXKNXG

SEQ ID NO: 302 - protein, 13 aa, synthetic construct
  REGION 1..13: note = Modified peptide: 454
  SITE 1: note = Mod_Res - C-terminal is: ac
  SITE 1: note = misc_feature - Modified Amino Acid: Pen
  SITE 4: note = misc_feature - Modified Amino Acid: 7PhW
  SITE 5: note = misc_feature - Modified Amino Acid: KAc
  SITE 6: note = misc_feature - Modified Amino Acid: Pen
  SITE 7: note = misc_feature - Modified Amino Acid: AEF(Ac)
  SITE 8: note = misc_feature - Modified Amino Acid: 2Nal
  SITE 9: note = misc_feature - Modified Amino Acid: THP
  SITE 10: note = misc_feature - Modified Amino Acid: KAc
  SITE 12: note = misc_feature - Modified Amino Acid: 3Pya
  SITE 13: note = misc_feature - Modified Amino Acid: MeGly
  SITE 13: note = Mod_Res - N-terminal is: am
  REGION 1..6: note = Disulfid - Cyclic bond: Pen to Pen
XNTWKXXXXKNXG

SEQ ID NO: 303 - protein, 14 aa, synthetic construct
  REGION 1..14: note = Modified peptide: 455dR
  SITE 1: note = Mod_Res - C-terminal is: ac
  SITE 1: note = misc_feature - Modified Amino Acid: dR
  SITE 2: note = misc_feature - Modified Amino Acid: Pen
  SITE 5: note = misc_feature - Modified Amino Acid: 7MeW
  SITE 6: note = misc_feature - Modified Amino Acid: KAc
  SITE 7: note = misc_feature - Modified Amino Acid: Pen
  SITE 8: note = misc_feature - Modified Amino Acid: AEF
  SITE 9: note = misc_feature - Modified Amino Acid: 2Nal
  SITE 10: note = misc_feature - Modified Amino Acid: Acpx
  SITE 13: note = misc_feature - Modified Amino Acid: THP
  SITE 14: note = misc_feature - Modified Amino Acid: MeGly
  SITE 14: note = Mod_Res - N-terminal is: am
  REGION 2..7: note = Disulfid - Cyclic bond: Pen to Pen
RXNTWKXXXXENXG

SEQ ID NO: 304 - protein, 14 aa, synthetic construct
  REGION 1..14: note = Modified peptide: 457dR
  SITE 1: note = Mod_Res - C-terminal is: ac
  SITE 1: note = misc_feature - Modified Amino Acid: dR
  SITE 2: note = misc_feature - Modified Amino Acid: Pen
  SITE 5: note = misc_feature - Modified Amino Acid: 7MeW
  SITE 6: note = misc_feature - Modified Amino Acid: KAc
  SITE 7: note = misc_feature - Modified Amino Acid: Pen
  SITE 8: note = misc_feature - Modified Amino Acid: AEF
  SITE 9: note = misc_feature - Modified Amino Acid: 2Nal
  SITE 10: note = misc_feature - Modified Amino Acid: Acpx
  SITE 14: note = misc_feature - Modified Amino Acid: MeGly
  SITE 14: note = Mod_Res - N-terminal is: am
  REGION 2..7: note = Disulfid - Cyclic bond: Pen to Pen
RXNTWKXXXXENLG

SEQ ID NO: 305 - protein, 14 aa, synthetic construct
  REGION 1..14: note = Modified peptide: 458dR
  SITE 1: note = Mod_Res - C-terminal is: ac
  SITE 1: note = misc_feature - Modified Amino Acid: dR
  SITE 2: note = misc_feature - Modified Amino Acid: Pen
  SITE 5: note = misc_feature - Modified Amino Acid: 7MeW
  SITE 6: note = misc_feature - Modified Amino Acid: KAc
  SITE 7: note = misc_feature - Modified Amino Acid: Pen
  SITE 8: note = misc_feature - Modified Amino Acid: AEF
  SITE 9: note = misc_feature - Modified Amino Acid: 2Nal
  SITE 10: note = misc_feature - Modified Amino Acid: Acpx
  SITE 14: note = misc_feature - Modified Amino Acid: 4AmDPhe
  SITE 14: note = Mod_Res - N-terminal is: am
  REGION 2..7: note = Disulfid - Cyclic bond: Pen to Pen
RXNTWKXXXXENHX

SEQ ID NO: 306 - protein, 14 aa, synthetic construct
  REGION 1..14: note = Modified peptide: 459dR
  SITE 1: note = Mod_Res - C-terminal is: ac
  SITE 1: note = misc_feature - Modified Amino Acid: dR
  SITE 2: note = misc_feature - Modified Amino Acid: Pen
  SITE 5: note = misc_feature - Modified Amino Acid: 7MeW
  SITE 6: note = misc_feature - Modified Amino Acid: KAc
  SITE 7: note = misc_feature - Modified Amino Acid: Pen
  SITE 8: note = misc_feature - Modified Amino Acid: AEF
  SITE 9: note = misc_feature - Modified Amino Acid: 2Nal
  SITE 10: note = misc_feature - Modified Amino Acid: Acpx
  SITE 14: note = misc_feature - Modified Amino Acid: 4AcDPhe
  SITE 14: note = Mod_Res - N-terminal is: am
  REGION 2..7: note = Disulfid - Cyclic bond: Pen to Pen
RXNTWKXXXXENHX

SEQ ID NO: 307 - protein, 14 aa, synthetic construct
  REGION 1..14: note = Modified peptide: 463dR
  SITE 1: note = Mod_Res - C-terminal is: ac
  SITE 1: note = misc_feature - Modified Amino Acid: dR
  SITE 2: note = misc_feature - Modified Amino Acid: Pen
  SITE 5: note = misc_feature - Modified Amino Acid: 7MeW
  SITE 6: note = misc_feature - Modified Amino Acid: KAc
  SITE 7: note = misc_feature - Modified Amino Acid: Pen
  SITE 8: note = misc_feature - Modified Amino Acid: AEF
  SITE 9: note = misc_feature - Modified Amino Acid: 2Nal
  SITE 10: note = misc_feature - Modified Amino Acid: Acpx
  SITE 13: note = misc_feature - Modified Amino Acid: 3Pya
  SITE 14: note = misc_feature - Modified Amino Acid: MeGly
  SITE 14: note = Mod_Res - N-terminal is: am
  REGION 2..7: note = Disulfid - Cyclic bond: Pen to Pen
RXNTWKXXXXENXG

SEQ ID NO: 308 - protein, 13 aa, synthetic construct
  REGION 1..13: note = Modified peptide: 466
  SITE 1: note = Mod_Res - C-terminal is: ac
  SITE 1: note = misc_feature - Modified Amino Acid: Pen
  SITE 4: note = misc_feature - Modified Amino Acid: 7MeW
  SITE 5: note = misc_feature - Modified Amino Acid: KAc
  SITE 6: note = misc_feature - Modified Amino Acid: Pen
  SITE 7: note = misc_feature - Modified Amino Acid: AEF
  SITE 8: note = misc_feature - Modified Amino Acid: 2Nal
  SITE 9: note = misc_feature - Modified Amino Acid: aMeK
  SITE 10: note = misc_feature - Modified Amino Acid: KAc
  SITE 12: note = misc_feature - Modified Amino Acid: bAla
  SITE 13: note = misc_feature - Modified Amino Acid: MeGly
  SITE 13: note = Mod_Res - N-terminal is: am
  REGION 1..6: note = Disulfid - Cyclic bond: Pen to Pen
XNTWKXXXKKNAG

SEQ ID NO: 309 - protein, 13 aa, synthetic construct
  REGION 1..13: note = Modified peptide: 467
  SITE 1: note = Mod_Res - C-terminal is: ac
  SITE 1: note = misc_feature - Modified Amino Acid: Pen
  SITE 4: note = misc_feature - Modified Amino Acid: 7MeW
  SITE 5: note = misc_feature - Modified Amino Acid: KAc
  SITE 6: note = misc_feature - Modified Amino Acid: Pen
  SITE 7: note = misc_feature - Modified Amino Acid: AEF
  SITE 8: note = misc_feature - Modified Amino Acid: 2Nal
  SITE 9: note = misc_feature - Modified Amino Acid: aMeK
  SITE 10: note = misc_feature - Modified Amino Acid: KAc
  SITE 13: note = misc_feature - Modified Amino Acid: MeGly
  SITE 13: note = Mod_Res - N-terminal is: am
  REGION 1..6: note = Disulfid - Cyclic bond: Pen to Pen
XNTWKXXXKKNVG

SEQ ID NO: 310 - protein, 13 aa, synthetic construct
  REGION 1..13: note = Modified peptide: 468
  SITE 1: note = Mod_Res - C-terminal is: ac
  SITE 1: note = misc_feature - Modified Amino Acid: Pen
  SITE 4: note = misc_feature - Modified Amino Acid: 7MeW
  SITE 5: note = misc_feature - Modified Amino Acid: KAc
  SITE 6: note = misc_feature - Modified Amino Acid: Pen
  SITE 7: note = misc_feature - Modified Amino Acid: AEF
  SITE 8: note = misc_feature - Modified Amino Acid: 2Nal
  SITE 9: note = misc_feature - Modified Amino Acid: aMeK
  SITE 10: note = misc_feature - Modified Amino Acid: KAc
  SITE 12: note = misc_feature - Modified Amino Acid: dR
  SITE 13: note = misc_feature - Modified Amino Acid: MeGly
  SITE 13: note = Mod_Res - N-terminal is: am
  REGION 1..6: note = Disulfid - Cyclic bond: Pen to Pen
XNTWKXXXKKNRG

SEQ ID NO: 311 - protein, 13 aa, synthetic construct
  REGION 1..13: note = Modified peptide: 469
  SITE 1: note = Mod_Res - C-terminal is: ac
  SITE 1: note = misc_feature - Modified Amino Acid: Pen
  SITE 4: note = misc_feature - Modified Amino Acid: 7MeW
  SITE 5: note = misc_feature - Modified Amino Acid: KAc
  SITE 6: note = misc_feature - Modified Amino Acid: Pen
  SITE 7: note = misc_feature - Modified Amino Acid: AEF
  SITE 8: note = misc_feature - Modified Amino Acid: 2Nal
  SITE 9: note = misc_feature - Modified Amino Acid: aMeK
  SITE 10: note = misc_feature - Modified Amino Acid: KAc
  SITE 12: note = misc_feature - Modified Amino Acid: homoF
  SITE 13: note = misc_feature - Modified Amino Acid: MeGly
  SITE 13: note = Mod_Res - N-terminal is: am
  REGION 1..6: note = Disulfid - Cyclic bond: Pen to Pen
XNTWKXXXKKNXG

SEQ ID NO: 312 - protein, 13 aa, synthetic construct
  REGION 1..13: note = Modified peptide: 470
  SITE 1: note = Mod_Res - C-terminal is: ac
  SITE 1: note = misc_feature - Modified Amino Acid: Pen
  SITE 4: note = misc_feature - Modified Amino Acid: 7MeW
  SITE 5: note = misc_feature - Modified Amino Acid: KAc
  SITE 6: note = misc_feature - Modified Amino Acid: Pen
  SITE 7: note = misc_feature - Modified Amino Acid: AEF
  SITE 8: note = misc_feature - Modified Amino Acid: 2Nal
  SITE 9: note = misc_feature - Modified Amino Acid: aMeK
  SITE 10: note = misc_feature - Modified Amino Acid: KAc
  SITE 13: note = misc_feature - Modified Amino Acid: MeGly
  SITE 13: note = Mod_Res - N-terminal is: am
  REGION 1..6: note = Disulfid - Cyclic bond: Pen to Pen
XNTWKXXXKKNYG

SEQ ID NO: 313 - protein, 13 aa, synthetic construct
  REGION 1..13: note = Modified peptide: 471
  SITE 1: note = Mod_Res - C-terminal is: ac
  SITE 1: note = misc_feature - Modified Amino Acid: Pen
  SITE 4: note = misc_feature - Modified Amino Acid: 7MeW
  SITE 5: note = misc_feature - Modified Amino Acid: KAc
  SITE 6: note = misc_feature - Modified Amino Acid: Pen
  SITE 7: note = misc_feature - Modified Amino Acid: AEF
  SITE 8: note = misc_feature - Modified Amino Acid: 2Nal
  SITE 9: note = misc_feature - Modified Amino Acid: aMeK
  SITE 10: note = misc_feature - Modified Amino Acid: KAc
  SITE 13: note = misc_feature - Modified Amino Acid: MeGly
  SITE 13: note = Mod_Res - N-terminal is: am
  REGION 1..6: note = Disulfid - Cyclic bond: Pen to Pen
XNTWKXXXKKNYG

SEQ ID NO: 314 - protein, 13 aa, synthetic construct
  REGION 1..13: note = Modified peptide: 472
  SITE 1: note = Mod_Res - C-terminal is: ac
  SITE 1: note = misc_feature - Modified Amino Acid: Pen
  SITE 5: note = misc_feature - Modified Amino Acid: KAc
  SITE 6: note = misc_feature - Modified Amino Acid: Pen
  SITE 7: note = misc_feature - Modified Amino Acid: AEF
  SITE 8: note = misc_feature - Modified Amino Acid: 2Nal
  SITE 9: note = misc_feature - Modified Amino Acid: THP
  SITE 12: note = misc_feature - Modified Amino Acid: 3Pya
  SITE 13: note = misc_feature - Modified Amino Acid: MeGly
  SITE 13: note = Mod_Res - N-terminal is: am
  REGION 1..6: note = Disulfid - Cyclic bond: Pen to Pen
XNTWKXXXXENXG

SEQ ID NO: 315 - protein, 13 aa, synthetic construct
  REGION 1..13: note = Modified peptide: 479
  SITE 1: note = Mod_Res - C-terminal is: ac
  SITE 1: note = misc_feature - Modified Amino Acid: Pen
  SITE 5: note = misc_feature - Modified Amino Acid: KAc
  SITE 6: note = misc_feature - Modified Amino Acid: Pen
  SITE 7: note = misc_feature - Modified Amino Acid: AEF
  SITE 8: note = misc_feature - Modified Amino Acid: 2Nal
  SITE 9: note = misc_feature - Modified Amino Acid: Acpx
  SITE 12: note = misc_feature - Modified Amino Acid: 3Pya
  SITE 13: note = misc_feature - Modified Amino Acid: MeGly
  SITE 13: note = Mod_Res - N-terminal is: am
  REGION 1..6: note = Disulfid - Cyclic bond: Pen to Pen
XNTWKXXXXENXG

SEQ ID NO: 316 - protein, 13 aa, synthetic construct
  REGION 1..13: note = Modified peptide: 480dR
  SITE 1: note = Mod_Res - C-terminal is: (SulfoCy3)
  SITE 1: note = misc_feature - Modified Amino Acid: dR
  SITE 2: note = misc_feature - Modified Amino Acid: Pen
  SITE 5: note = misc_feature - Modified Amino Acid: 7MeW
  SITE 6: note = misc_feature - Modified Amino Acid: KAc
  SITE 7: note = misc_feature - Modified Amino Acid: Pen
  SITE 8: note = misc_feature - Modified Amino Acid: AEF
  SITE 9: note = misc_feature - Modified Amino Acid: 2Nal
  SITE 10: note = misc_feature - Modified Amino Acid: THP
  SITE 13: note = misc_feature - Modified Amino Acid: aMePhe
  SITE 13: note = Mod_Res - N-terminal is: am
  REGION 2..7: note = Disulfid - Cyclic bond: Pen to Pen
RXNTWKXXXXENF

SEQ ID NO: 317 - protein, 13 aa, synthetic construct
  REGION 1..13: note = Modified peptide: 481dR
  SITE 1: note = Mod_Res - C-terminal is: (SulfoCy3dPEG2)
  SITE 1: note = misc_feature - Modified Amino Acid: dR
  SITE 2: note = misc_feature - Modified Amino Acid: Pen
  SITE 5: note = misc_feature - Modified Amino Acid: 7MeW
  SITE 6: note = misc_feature - Modified Amino Acid: KAc
  SITE 7: note = misc_feature - Modified Amino Acid: Pen
  SITE 8: note = misc_feature - Modified Amino Acid: AEF
  SITE 9: note = misc_feature - Modified Amino Acid: 2Nal
  SITE 10: note = misc_feature - Modified Amino Acid: THP
  SITE 13: note = misc_feature - Modified Amino Acid: aMePhe
  SITE 13: note = Mod_Res - N-terminal is: am
  REGION 2..7: note = Disulfid - Cyclic bond: Pen to Pen
RXNTWKXXXXENF

SEQ ID NO: 318 - protein, 13 aa, synthetic construct
  REGION 1..13: note = Modified peptide: 482dR
  SITE 1: note = Mod_Res - C-terminal is: (SulfoCy3dPEG3)
  SITE 1: note = misc_feature - Modified Amino Acid: dR
  SITE 2: note = misc_feature - Modified Amino Acid: Pen
  SITE 5: note = misc_feature - Modified Amino Acid: 7MeW
  SITE 6: note = misc_feature - Modified Amino Acid: KAc
  SITE 7: note = misc_feature - Modified Amino Acid: Pen
  SITE 8: note = misc_feature - Modified Amino Acid: AEF
  SITE 9: note = misc_feature - Modified Amino Acid: 2Nal
  SITE 10: note = misc_feature - Modified Amino Acid: THP
  SITE 13: note = misc_feature - Modified Amino Acid: aMePhe
  SITE 13: note = Mod_Res - N-terminal is: am
  REGION 2..7: note = Disulfid - Cyclic bond: Pen to Pen
RXNTWKXXXXENF

SEQ ID NO: 319 - protein, 12 aa, synthetic construct
  REGION 1..12: note = Modified peptide: 483
  SITE 1: note = Mod_Res - C-terminal is: SMSBCO
  SITE 1: note = misc_feature - Modified Amino Acid: Pen
  SITE 4: note = misc_feature - Modified Amino Acid: 7MeW
  SITE 5: note = misc_feature - Modified Amino Acid: KAc
  SITE 6: note = misc_feature - Modified Amino Acid: Pen
  SITE 7: note = misc_feature - Modified Amino Acid: AEF
  SITE 8: note = misc_feature - Modified Amino Acid: 2Nal
  SITE 9: note = misc_feature - Modified Amino Acid: aMeK
  SITE 10: note = misc_feature - Modified Amino Acid: KAc
  SITE 12: note = misc_feature - Modified Amino Acid: aMePhe
  SITE 12: note = Mod_Res - N-terminal is: am
  REGION 1..6: note = Disulfid - Cyclic bond: Pen to Pen
XNTWKXXXKKNF

SEQ ID NO: 320 - protein, 13 aa, synthetic construct
  REGION 1..13: note = Modified peptide: 485dR
  SITE 1: note = Mod_Res - C-terminal is: ac
  SITE 1: note = misc_feature - Modified Amino Acid: dR
  SITE 2: note = misc_feature - Modified Amino Acid: Pen
  SITE 5: note = misc_feature - Modified Amino Acid: 7MeW
  SITE 6: note = misc_feature - Modified Amino Acid: KAc
  SITE 7: note = misc_feature - Modified Amino Acid: Pen
  SITE 8: note = misc_feature - Modified Amino Acid: AEF
  SITE 9: note = misc_feature - Modified Amino Acid: 2Nal
  SITE 10: note = misc_feature - Modified Amino Acid: THP
  SITE 13: note = misc_feature - Modified Amino Acid: 3OHPhe
  SITE 13: note = Mod_Res - N-terminal is: am
  REGION 2..7: note = Disulfid - Cyclic bond: Pen to Pen
RXNTWKXXXXENF

SEQ ID NO: 321 - protein, 13 aa, synthetic construct
  REGION 1..13: note = Modified peptide: 486dR
  SITE 1: note = Mod_Res - C-terminal is: SMSBCO
  SITE 1: note = misc_feature - Modified Amino Acid: dR
  SITE 2: note = misc_feature - Modified Amino Acid: Pen
  SITE 5: note = misc_feature - Modified Amino Acid: 7MeW
  SITE 6: note = misc_feature - Modified Amino Acid: KAc
  SITE 7: note = misc_feature - Modified Amino Acid: Pen
  SITE 8: note = misc_feature - Modified Amino Acid: AEF
  SITE 9: note = misc_feature - Modified Amino Acid: 2Nal
  SITE 10: note = misc_feature - Modified Amino Acid: THP
  SITE 13: note = misc_feature - Modified Amino Acid: aMePhe
  SITE 13: note = Mod_Res - N-terminal is: am
  REGION 2..7: note = Disulfid - Cyclic bond: Pen to Pen
RXNTWKXXXXENF

SEQ ID NO: 322 - protein, 13 aa, synthetic construct
  REGION 1..13: note = Modified peptide: 487dR
  SITE 1: note = Mod_Res - C-terminal is: ac
  SITE 1: note = misc_feature - Modified Amino Acid: dR
  SITE 2: note = misc_feature - Modified Amino Acid: Pen
  SITE 5: note = misc_feature - Modified Amino Acid: 7MeW
  SITE 6: note = misc_feature - Modified Amino Acid: KAc
  SITE 7: note = misc_feature - Modified Amino Acid: Pen
  SITE 8: note = misc_feature - Modified Amino Acid: AEF
  SITE 9: note = misc_feature - Modified Amino Acid: 2Nal
  SITE 10: note = misc_feature - Modified Amino Acid: THP
  SITE 13: note = misc_feature - Modified Amino Acid: 4PyridinAla
  SITE 13: note = Mod_Res - N-terminal is: am
  REGION 2..7: note = Disulfid - Cyclic bond: Pen to Pen
RXNTWKXXXXENX

SEQ ID NO: 323 - protein, 13 aa, synthetic construct
  REGION 1..13: note = Modified peptide: 489
  SITE 1: note = Mod_Res - C-terminal is: ac
  SITE 1: note = misc_feature - Modified Amino Acid: Pen
  SITE 4: note = misc_feature - Modified Amino Acid: 7MeW
  SITE 5: note = misc_feature - Modified Amino Acid: KAc
  SITE 6: note = misc_feature - Modified Amino Acid: Pen
  SITE 7: note = misc_feature - Modified Amino Acid: AEF
  SITE 8: note = misc_feature - Modified Amino Acid: 2Nal
  SITE 9: note = misc_feature - Modified Amino Acid: aMeK
  SITE 10: note = misc_feature - Modified Amino Acid: KAc
  SITE 12: note = misc_feature - Modified Amino Acid: F(CF3)
  SITE 13: note = misc_feature - Modified Amino Acid: MeGly
  SITE 13: note = Mod_Res - N-terminal is: am
  REGION 1..6: note = Disulfid - Cyclic bond: Pen to Pen
XNTWKXXXKKNXG

SEQ ID NO: 324 - protein, 13 aa, synthetic construct
  REGION 1..13: note = Modified peptide: 490
  SITE 1: note = Mod_Res - C-terminal is: ac
  SITE 1: note = misc_feature - Modified Amino Acid: Pen
  SITE 4: note = misc_feature - Modified Amino Acid: 7MeW
  SITE 5: note = misc_feature - Modified Amino Acid: KAc
  SITE 6: note = misc_feature - Modified Amino Acid: Pen
  SITE 7: note = misc_feature - Modified Amino Acid: AEF
  SITE 8: note = misc_feature - Modified Amino Acid: 2Nal
  SITE 9: note = misc_feature - Modified Amino Acid: aMeK
  SITE 10: note = misc_feature - Modified Amino Acid: KAc
  SITE 12: note = misc_feature - Modified Amino Acid: Y(CHF2)
  SITE 13: note = misc_feature - Modified Amino Acid: MeGly
  SITE 13: note = Mod_Res - N-terminal is: am
  REGION 1..6: note = Disulfid - Cyclic bond: Pen to Pen
XNTWKXXXKKNXG

SEQ ID NO: 325 - protein, 13 aa, synthetic construct
  REGION 1..13: note = Modified peptide: 494
  SITE 1: note = Mod_Res - C-terminal is: ac
  SITE 1: note = misc_feature - Modified Amino Acid: Pen
  SITE 4: note = misc_feature - Modified Amino Acid: 7MeW
  SITE 5: note = misc_feature - Modified Amino Acid: KAc
  SITE 6: note = misc_feature - Modified Amino Acid: Pen
  SITE 7: note = misc_feature - Modified Amino Acid: AEF
  SITE 8: note = misc_feature - Modified Amino Acid: 2Nal
  SITE 9: note = misc_feature - Modified Amino Acid: aMeK
  SITE 10: note = misc_feature - Modified Amino Acid: KAc
  SITE 12: note = misc_feature - Modified Amino Acid: THP
  SITE 13: note = Mod_Res - N-terminal is: am
  REGION 1..6: note = Disulfid - Cyclic bond: Pen to Pen
XNTWKXXXKKNXP

SEQ ID NO: 326 - protein, 14 aa, synthetic construct
  REGION 1..14: note = Modified peptide: 496dR
  SITE 1: note = Mod_Res - C-terminal is: ac
  SITE 1: note = misc_feature - Modified Amino Acid: dR
  SITE 2: note = misc_feature - Modified Amino Acid: Pen
  SITE 5: note = misc_feature - Modified Amino Acid: 7MeW
  SITE 6: note = misc_feature - Modified Amino Acid: KAc
  SITE 7: note = misc_feature - Modified Amino Acid: Pen
  SITE 8: note = misc_feature - Modified Amino Acid: AEF
  SITE 9: note = misc_feature - Modified Amino Acid: 2Nal
  SITE 10: note = misc_feature - Modified Amino Acid: THP
  SITE 13: note = misc_feature - Modified Amino Acid: 3Pya
  SITE 14: note = misc_feature - Modified Amino Acid: MeGly
  SITE 14: note = Mod_Res - N-terminal is: am
  REGION 2..7: note = Disulfid - Cyclic bond: Pen to Pen
RXNTWKXXXXENXG

SEQ ID NO: 327 - protein, 14 aa, synthetic construct
  REGION 1..14: note = Modified peptide: 498dR
  SITE 1: note = Mod_Res - C-terminal is: ac
  SITE 1: note = misc_feature - Modified Amino Acid: dR
  SITE 2: note = misc_feature - Modified Amino Acid: Pen
  SITE 5: note = misc_feature - Modified Amino Acid: 7MeW
  SITE 6: note = misc_feature - Modified Amino Acid: KAc
  SITE 7: note = misc_feature - Modified Amino Acid: Pen
  SITE 8: note = misc_feature - Modified Amino Acid: AEF
  SITE 9: note = misc_feature - Modified Amino Acid: 2Nal
  SITE 10: note = misc_feature - Modified Amino Acid: THP
  SITE 13: note = misc_feature - Modified Amino Acid: 4Pya
  SITE 14: note = misc_feature - Modified Amino Acid: MeGly
  SITE 14: note = Mod_Res - N-terminal is: am
  REGION 2..7: note = Disulfid - Cyclic bond: Pen to Pen
RXNTWKXXXXENXG

SEQ ID NO: 328 - protein, 14 aa, synthetic construct
  REGION 1..14: note = Modified peptide: 499dR
  SITE 1: note = Mod_Res - C-terminal is: ac
  SITE 1: note = misc_feature - Modified Amino Acid: dR
  SITE 2: note = misc_feature - Modified Amino Acid: Pen
  SITE 5: note = misc_feature - Modified Amino Acid: 7MeW
  SITE 6: note = misc_feature - Modified Amino Acid: KAc
  SITE 7: note = misc_feature - Modified Amino Acid: Pen
  SITE 8: note = misc_feature - Modified Amino Acid: AEF
  SITE 9: note = misc_feature - Modified Amino Acid: 2Nal
  SITE 10: note = misc_feature - Modified Amino Acid: THP
  SITE 13: note = misc_feature - Modified Amino Acid: oAMPhe
  SITE 14: note = misc_feature - Modified Amino Acid: MeGly
  SITE 14: note = Mod_Res - N-terminal is: am
  REGION 2..7: note = Disulfid - Cyclic bond: Pen to Pen
RXNTWKXXXXENXG

SEQ ID NO: 329 - protein, 14 aa, synthetic construct
  REGION 1..14: note = Modified peptide: 500dR
  SITE 1: note = Mod_Res - C-terminal is: ac
  SITE 1: note = misc_feature - Modified Amino Acid: dR
  SITE 2: note = misc_feature - Modified Amino Acid: Pen
  SITE 5: note = misc_feature - Modified Amino Acid: 7MeW
  SITE 6: note = misc_feature - Modified Amino Acid: KAc
  SITE 7: note = misc_feature - Modified Amino Acid: Pen
  SITE 8: note = misc_feature - Modified Amino Acid: AEF
  SITE 9: note = misc_feature - Modified Amino Acid: 2Nal
  SITE 10: note = misc_feature - Modified Amino Acid: THP
  SITE 13: note = misc_feature - Modified Amino Acid: 3Pya
  SITE 14: note = misc_feature - Modified Amino Acid: 4diFPro
  SITE 14: note = Mod_Res - N-terminal is: am
  REGION 2..7: note = Disulfid - Cyclic bond: Pen to Pen
RXNTWKXXXXENXX

SEQ ID NO: 330 - protein, 14 aa, synthetic construct
  REGION 1..14: note = Modified peptide: 502dR
  SITE 1: note = Mod_Res - C-terminal is: ac
  SITE 1: note = misc_feature - Modified Amino Acid: dR
  SITE 2: note = misc_feature - Modified Amino Acid: Pen
  SITE 5: note = misc_feature - Modified Amino Acid: 7MeW
  SITE 6: note = misc_feature - Modified Amino Acid: KAc
  SITE 7: note = misc_feature - Modified Amino Acid: Pen
  SITE 8: note = misc_feature - Modified Amino Acid: AEF
  SITE 9: note = misc_feature - Modified Amino Acid: 2Nal
  SITE 10: note = misc_feature - Modified Amino Acid: THP
  SITE 13: note = misc_feature - Modified Amino Acid: 3Pya
  SITE 14: note = misc_feature - Modified Amino Acid: aMeP
  SITE 14: note = Mod_Res - N-terminal is: am
  REGION 2..7: note = Disulfid - Cyclic bond: Pen to Pen
RXNTWKXXXXENXP

SEQ ID NO: 331 - protein, 14 aa, synthetic construct
  REGION 1..14: note = Modified peptide: 503dR
  SITE 1: note = Mod_Res - C-terminal is: ac
  SITE 1: note = misc_feature - Modified Amino Acid: dR
  SITE 2: note = misc_feature - Modified Amino Acid: Pen
  SITE 5: note = misc_feature - Modified Amino Acid: 7MeW
  SITE 6: note = misc_feature - Modified Amino Acid: KAc
  SITE 7: note = misc_feature - Modified Amino Acid: Pen
  SITE 8: note = misc_feature - Modified Amino Acid: AEF
  SITE 9: note = misc_feature - Modified Amino Acid: 2Nal
  SITE 10: note = misc_feature - Modified Amino Acid: THP
  SITE 13: note = misc_feature - Modified Amino Acid: 3Pya
  SITE 14: note = misc_feature - Modified Amino Acid: AIB
  SITE 14: note = Mod_Res - N-terminal is: am
  REGION 2..7: note = Disulfid - Cyclic bond: Pen to Pen
RXNTWKXXXXENXX

SEQ ID NO: 332 - protein, 13 aa, synthetic construct
  REGION 1..13: note = Modified peptide: 507
  SITE 1: note = Mod_Res - C-terminal is: ac
  SITE 1: note = misc_feature - Modified Amino Acid: Pen
  SITE 4: note = misc_feature - Modified Amino Acid: 7MeW
  SITE 5: note = misc_feature - Modified Amino Acid: KAc
  SITE 6: note = misc_feature - Modified Amino Acid: Pen
  SITE 7: note = misc_feature - Modified Amino Acid: AEF
  SITE 8: note = misc_feature - Modified Amino Acid: 2Nal
  SITE 9: note = misc_feature - Modified Amino Acid: aMeK
  SITE 10: note = misc_feature - Modified Amino Acid: KAc
  SITE 12: note = misc_feature - Modified Amino Acid: 3MeH
  SITE 13: note = misc_feature - Modified Amino Acid: MeGly
  SITE 13: note = Mod_Res - N-terminal is: am
  REGION 1..6: note = Disulfid - Cyclic bond: Pen to Pen
XNTWKXXXKKNHG

SEQ ID NO: 333 - protein, 14 aa, synthetic construct
  REGION 1..14: note = Modified peptide: 545dR
  SITE 1: note = Mod_Res - C-terminal is: ac
  SITE 1: note = misc_feature - Modified Amino Acid: dR
  SITE 2: note = misc_feature - Modified Amino Acid: Pen
  SITE 5: note = misc_feature - Modified Amino Acid: 7MeW
  SITE 6: note = misc_feature - Modified Amino Acid: KAc
  SITE 7: note = misc_feature - Modified Amino Acid: Pen
  SITE 8: note = misc_feature - Modified Amino Acid: AEF
  SITE 9: note = misc_feature - Modified Amino Acid: 2Nal
  SITE 10: note = misc_feature - Modified Amino Acid: THP
  SITE 13: note = misc_feature - Modified Amino Acid: 3MeH
  SITE 14: note = misc_feature - Modified Amino Acid: MeGly
  SITE 14: note = Mod_Res - N-terminal is: am
  REGION 2..7: note = Disulfid - Cyclic bond: Pen to Pen
RXNTWKXXXXENHG

SEQ ID NO: 334 - protein, 13 aa, synthetic construct
  REGION 1..13: note = Modified peptide: 546dR
  SITE 1: note = Mod_Res - C-terminal is: ac
  SITE 1: note = misc_feature - Modified Amino Acid: dR
  SITE 2: note = misc_feature - Modified Amino Acid: Pen
  SITE 5: note = misc_feature - Modified Amino Acid: 5MeW
  SITE 6: note = misc_feature - Modified Amino Acid: KAc
  SITE 7: note = misc_feature - Modified Amino Acid: Pen
  SITE 8: note = misc_feature - Modified Amino Acid: AEF
  SITE 9: note = misc_feature - Modified Amino Acid: 2Nal
  SITE 10: note = misc_feature - Modified Amino Acid: THP
  SITE 13: note = misc_feature - Modified Amino Acid: aMePhe
  SITE 13: note = Mod_Res - N-terminal is: am
  REGION 2..7: note = Disulfid - Cyclic bond: Pen to Pen
RXNTXKXXXXENF

SEQ ID NO: 335 - protein, 14 aa, synthetic construct
  REGION 1..14: note = Modified peptide: 547dR
  SITE 1: note = Mod_Res - C-terminal is: ac
  SITE 1: note = misc_feature - Modified Amino Acid: dR
  SITE 2: note = misc_feature - Modified Amino Acid: Pen
  SITE 6: note = misc_feature - Modified Amino Acid: KAc
  SITE 7: note = misc_feature - Modified Amino Acid: Pen
  SITE 8: note = misc_feature - Modified Amino Acid: AEF
  SITE 9: note = misc_feature - Modified Amino Acid: 2Nal
  SITE 10: note = misc_feature - Modified Amino Acid: THP
  SITE 13: note = misc_feature - Modified Amino Acid: 3MeH
  SITE 14: note = misc_feature - Modified Amino Acid: MeGly
  SITE 14: note = Mod_Res - N-terminal is: am
  REGION 2..7: note = Disulfid - Cyclic bond: Pen to Pen
RXNTWKXXXXENHG

SEQ ID NO: 336 - protein, 14 aa, synthetic construct
  REGION 1..14: note = Modified peptide: 555dR
  SITE 1: note = Mod_Res - C-terminal is: ac
  SITE 1: note = misc_feature - Modified Amino Acid: dR
  SITE 2: note = misc_feature - Modified Amino Acid: Pen
  SITE 5: note = misc_feature - Modified Amino Acid: 7MeW
  SITE 6: note = misc_feature - Modified Amino Acid: KAc
  SITE 7: note = misc_feature - Modified Amino Acid: Pen
  SITE 8: note = misc_feature - Modified Amino Acid: AEF
  SITE 9: note = misc_feature - Modified Amino Acid: 2Nal
  SITE 10: note = misc_feature - Modified Amino Acid: THP
  SITE 13: note = misc_feature - Modified Amino Acid: D3Pya
  SITE 14: note = misc_feature - Modified Amino Acid: MeGly
  SITE 14: note = Mod_Res - N-terminal is: am
  REGION 2..7: note = Disulfid - Cyclic bond: Pen to Pen
RXNTWKXXXXENXG

SEQ ID NO: 337 - protein, 13 aa, synthetic construct
  REGION 1..13: note = Modified peptide: 556dR
  SITE 1: note = Mod_Res - C-terminal is: ac
  SITE 1: note = misc_feature - Modified Amino Acid: dR
  SITE 2: note = misc_feature - Modified Amino Acid: Pen
  SITE 5: note = misc_feature - Modified Amino Acid: 7MeW
  SITE 6: note = misc_feature - Modified Amino Acid: KAc
  SITE 7: note = misc_feature - Modified Amino Acid: Pen
  SITE 8: note = misc_feature - Modified Amino Acid: AEF
  SITE 9: note = misc_feature - Modified Amino Acid: 2Nal
  SITE 10: note = misc_feature - Modified Amino Acid: THP
  SITE 13: note = misc_feature - Modified Amino Acid: 3Pya
  SITE 13: note = Mod_Res - N-terminal is: CONHMe
  REGION 2..7: note = Disulfid - Cyclic bond: Pen to Pen
RXNTWKXXXXENX

SEQ ID NO: 338 - protein, 14 aa, synthetic construct
  REGION 1..14: note = Modified peptide: 561dR
  SITE 1: note = Mod_Res - C-terminal is: FPrpTriazoleMeCO
  SITE 1: note = misc_feature - Modified Amino Acid: dR
  SITE 2: note = misc_feature - Modified Amino Acid: Pen
  SITE 4: note = misc_feature - Modified Amino Acid: Hyp
  SITE 5: note = misc_feature - Modified Amino Acid: 3Pya
  SITE 6: note = misc_feature - Modified Amino Acid: KAc
  SITE 7: note = misc_feature - Modified Amino Acid: Pen
  SITE 8: note = misc_feature - Modified Amino Acid: AEF
  SITE 9: note = misc_feature - Modified Amino Acid: 2Nal
  SITE 10: note = misc_feature - Modified Amino Acid: THP
  SITE 12: note = misc_feature - Modified Amino Acid: 3Pya
  SITE 14: note = misc_feature - Modified Amino Acid: MeGly
  SITE 14: note = Mod_Res - N-terminal is: am
  REGION 2..7: note = Disulfid - Cyclic bond: Pen to Pen
RXNXXKXXXXEXNG

SEQ ID NO: 339 - protein, 14 aa, synthetic construct
  REGION 1..14: note = Modified peptide: 568dR
  SITE 1: note = Mod_Res - C-terminal is: NH2
  SITE 1: note = misc_feature - Modified Amino Acid: dR
  SITE 2: note = misc_feature - Modified Amino Acid: Pen
  SITE 5: note = misc_feature - Modified Amino Acid: 7MeW
  SITE 6: note = misc_feature - Modified Amino Acid: KAc
  SITE 7: note = misc_feature - Modified Amino Acid: Pen
  SITE 8: note = misc_feature - Modified Amino Acid: AEF
  SITE 9: note = misc_feature - Modified Amino Acid: 2Nal
  SITE 10: note = misc_feature - Modified Amino Acid: THP
  SITE 13: note = misc_feature - Modified Amino Acid: 3Pya
  SITE 14: note = misc_feature - Modified Amino Acid: MeGly
  SITE 14: note = Mod_Res - N-terminal is: am
  REGION 2..7: note = Disulfid - Cyclic bond: Pen to Pen
RXNTWKXXXXENXG

SEQ ID NO: 340 - protein, 14 aa, synthetic construct
  REGION 1..14: note = Modified peptide: 569dR
  SITE 1: note = Mod_Res - C-terminal is: ac
  SITE 1: note = misc_feature - Modified Amino Acid: dR
  SITE 2: note = misc_feature - Modified Amino Acid: Pen
  SITE 6: note = misc_feature - Modified Amino Acid: KAc
  SITE 7: note = misc_feature - Modified Amino Acid: Pen
  SITE 8: note = misc_feature - Modified Amino Acid: AEF
  SITE 9: note = misc_feature - Modified Amino Acid: 2Nal
  SITE 10: note = misc_feature - Modified Amino Acid: THP
  SITE 13: note = misc_feature - Modified Amino Acid: 3Pya
  SITE 14: note = misc_feature - Modified Amino Acid: MeGly
  SITE 14: note = Mod_Res - N-terminal is: am
  REGION 2..7: note = Disulfid - Cyclic bond: Pen to Pen
RXNTWKXXXXENXG

SEQ ID NO: 341 - protein, 14 aa, synthetic construct
  REGION 1..14: note = Modified peptide: 570dR
  SITE 1: note = Mod_Res - C-terminal is: EtCO
  SITE 1: note = misc_feature - Modified Amino Acid: dR
  SITE 2: note = misc_feature - Modified Amino Acid: Pen
  SITE 5: note = misc_feature - Modified Amino Acid: 7MeW
  SITE 6: note = misc_feature - Modified Amino Acid: KAc
  SITE 7: note = misc_feature - Modified Amino Acid: Pen
  SITE 8: note = misc_feature - Modified Amino Acid: AEF(EtCO)
  SITE 9: note = misc_feature - Modified Amino Acid: 2Nal
  SITE 10: note = misc_feature - Modified Amino Acid: THP
  SITE 13: note = misc_feature - Modified Amino Acid: 3Pya
  SITE 14: note = misc_feature - Modified Amino Acid: MeGly
  SITE 14: note = Mod_Res - N-terminal is: am
  REGION 2..7: note = Disulfid - Cyclic bond: Pen to Pen
RXNTWKXXXXENXG

SEQ ID NO: 342 - protein, 14 aa, synthetic construct
  REGION 1..14: note = Modified peptide: 572dR
  SITE 1: note = Mod_Res - C-terminal is: ac
  SITE 1: note = misc_feature - Modified Amino Acid: dR
  SITE 2: note = misc_feature - Modified Amino Acid: Pen
  SITE 5: note = misc_feature - Modified Amino Acid: 7MeW
  SITE 6: note = misc_feature - Modified Amino Acid: KAc
  SITE 7: note = misc_feature - Modified Amino Acid: Pen
  SITE 8: note = misc_feature - Modified Amino Acid: AEF(BH)
  SITE 9: note = misc_feature - Modified Amino Acid: 2Nal
  SITE 10: note = misc_feature - Modified Amino Acid: THP
  SITE 13: note = misc_feature - Modified Amino Acid: 3Pya
  SITE 14: note = misc_feature - Modified Amino Acid: MeGly
  SITE 14: note = Mod_Res - N-terminal is: am
  REGION 2..7: note = Disulfid - Cyclic bond: Pen to Pen
RXNTWKXXXXENXG

SEQ ID NO: 343 - protein, 14 aa, synthetic construct
  REGION 1..14: note = Modified peptide: 574dR
  SITE 1: note = Mod_Res - C-terminal is: AzCO
  SITE 1: note = misc_feature - Modified Amino Acid: dR
  SITE 2: note = misc_feature - Modified Amino Acid: Pen
  SITE 5: note = misc_feature - Modified Amino Acid: 7MeW
  SITE 6: note = misc_feature - Modified Amino Acid: KAc
  SITE 7: note = misc_feature - Modified Amino Acid: Pen
  SITE 8: note = misc_feature - Modified Amino Acid: AEF
  SITE 9: note = misc_feature - Modified Amino Acid: 2Nal
  SITE 10: note = misc_feature - Modified Amino Acid: THP
  SITE 13: note = misc_feature - Modified Amino Acid: 3Pya
  SITE 14: note = misc_feature - Modified Amino Acid: MeGly
  SITE 14: note = Mod_Res - N-terminal is: am
  REGION 2..7: note = Disulfid - Cyclic bond: Pen to Pen
RXNTWKXXXXENXG

SEQ ID NO: 344 - protein, 14 aa, synthetic construct
  REGION 1..14: note = Modified peptide: 576dR
  SITE 1: note = Mod_Res - C-terminal is: FPrpTriazoleMeCO
  SITE 1: note = misc_feature - Modified Amino Acid: dR
  SITE 2: note = misc_feature - Modified Amino Acid: Pen
  SITE 5: note = misc_feature - Modified Amino Acid: 7MeW
  SITE 6: note = misc_feature - Modified Amino Acid: KAc
  SITE 7: note = misc_feature - Modified Amino Acid: Pen
  SITE 8: note = misc_feature - Modified Amino Acid: AEF
  SITE 9: note = misc_feature - Modified Amino Acid: 2Nal
  SITE 10: note = misc_feature - Modified Amino Acid: THP
  SITE 13: note = misc_feature - Modified Amino Acid: 3Pya
  SITE 14: note = misc_feature - Modified Amino Acid: MeGly
  SITE 14: note = Mod_Res - N-terminal is: am
  REGION 2..7: note = Disulfid - Cyclic bond: Pen to Pen
RXNTWKXXXXENXG

SEQ ID NO: 345 - protein, 14 aa, synthetic construct
  REGION 1..14: note = Modified peptide: 577dR
  SITE 1: note = Mod_Res - C-terminal is: ac
  SITE 1: note = misc_feature - Modified Amino Acid: dR
  SITE 2: note = misc_feature - Modified Amino Acid: Pen
  SITE 5: note = misc_feature - Modified Amino Acid: 7MeW
  SITE 6: note = misc_feature - Modified Amino Acid: KAc
  SITE 7: note = misc_feature - Modified Amino Acid: Pen
  SITE 8: note = misc_feature - Modified Amino Acid: AEF
  SITE 9: note = misc_feature - Modified Amino Acid: 2Nal
  SITE 10: note = misc_feature - Modified Amino Acid: THP
  SITE 13: note = misc_feature - Modified Amino Acid: 5MePyridinAla
  SITE 14: note = misc_feature - Modified Amino Acid: MeGly
  SITE 14: note = Mod_Res - N-terminal is: am
  REGION 2..7: note = Disulfid - Cyclic bond: Pen to Pen
RXNTWKXXXXENXG

SEQ ID NO: 346 - protein, 14 aa, synthetic construct
  REGION 1..14: note = Modified peptide: 579dR
  SITE 1: note = Mod_Res - C-terminal is: ac
  SITE 1: note = misc_feature - Modified Amino Acid: dR
  SITE 2: note = misc_feature - Modified Amino Acid: Pen
  SITE 5: note = misc_feature - Modified Amino Acid: 7MeW
  SITE 6: note = misc_feature - Modified Amino Acid: KAc
  SITE 7: note = misc_feature - Modified Amino Acid: Pen
  SITE 8: note = misc_feature - Modified Amino Acid: AEF
  SITE 9: note = misc_feature - Modified Amino Acid: 2Nal
  SITE 10: note = misc_feature - Modified Amino Acid: THP
  SITE 13: note = misc_feature - Modified Amino Acid: 5AmPyridinAla
  SITE 14: note = misc_feature - Modified Amino Acid: MeGly
  SITE 14: note = Mod_Res - N-terminal is: am
  REGION 2..7: note = Disulfid - Cyclic bond: Pen to Pen
RXNTWKXXXXENXG

SEQ ID NO: 347 - protein, 12 aa, synthetic construct
  REGION 1..12: note = Modified peptide: 593
  SITE 1: note = Mod_Res - C-terminal is: ac
  SITE 1: note = misc_feature - Modified Amino Acid: Pen
  SITE 4: note = misc_feature - Modified Amino Acid: 7MeW
  SITE 5: note = misc_feature - Modified Amino Acid: KAc
  SITE 6: note = misc_feature - Modified Amino Acid: Pen
  SITE 7: note = misc_feature - Modified Amino Acid: AEF
  SITE 8: note = misc_feature - Modified Amino Acid: 2Nal
  SITE 9: note = misc_feature - Modified Amino Acid: THP
  SITE 12: note = misc_feature - Modified Amino Acid: 3MeH
  SITE 12: note = Mod_Res - N-terminal is: CONHMe
  REGION 1..6: note = Disulfid - Cyclic bond: Pen to Pen
XNTWKXXXXENH

SEQ ID NO: 348 - protein, 14 aa, synthetic construct
  REGION 1..14: note = Modified peptide: 596dR
  SITE 1: note = Mod_Res - C-terminal is: AzCO
  SITE 1: note = misc_feature - Modified Amino Acid: dR
  SITE 2: note = misc_feature - Modified Amino Acid: Pen
  SITE 4: note = misc_feature - Modified Amino Acid: Hyp
  SITE 5: note = misc_feature - Modified Amino Acid: 3Pya
  SITE 6: note = misc_feature - Modified Amino Acid: KAc
  SITE 7: note = misc_feature - Modified Amino Acid: Pen
  SITE 8: note = misc_feature - Modified Amino Acid: AEF
  SITE 9: note = misc_feature - Modified Amino Acid: 2Nal
  SITE 10: note = misc_feature - Modified Amino Acid: THP
  SITE 12: note = misc_feature - Modified Amino Acid: 3Pya
  SITE 14: note = misc_feature - Modified Amino Acid: MeGly
  SITE 14: note = Mod_Res - N-terminal is: am
  REGION 2..7: note = Disulfid - Cyclic bond: Pen to Pen
RXNXXKXXXXEXNG

SEQ ID NO: 349 - protein, 14 aa, synthetic construct
  REGION 1..14: note = Modified peptide: 600dR
  SITE 1: note = Mod_Res - C-terminal is: ac
  SITE 1: note = misc_feature - Modified Amino Acid: dR
  SITE 2: note = misc_feature - Modified Amino Acid: Pen
  SITE 5: note = misc_feature - Modified Amino Acid: 7MeW
  SITE 6: note = misc_feature - Modified Amino Acid: KAc
  SITE 7: note = misc_feature - Modified Amino Acid: Pen
  SITE 8: note = misc_feature - Modified Amino Acid: AEF
  SITE 9: note = misc_feature - Modified Amino Acid: 2Nal
  SITE 10: note = misc_feature - Modified Amino Acid: THP
  SITE 13: note = misc_feature - Modified Amino Acid: 3QuinolAla
  SITE 14: note = misc_feature - Modified Amino Acid: MeGly
  SITE 14: note = Mod_Res - N-terminal is: am
  REGION 2..7: note = Disulfid - Cyclic bond: Pen to Pen
RXNTWKXXXXENXG

SEQ ID NO: 350 - protein, 13 aa, synthetic construct
  REGION 1..13: note = Modified peptide: 601dR
  SITE 1: note = Mod_Res - C-terminal is: ac
  SITE 1: note = misc_feature - Modified Amino Acid: dR
  SITE 2: note = misc_feature - Modified Amino Acid: Pen
  SITE 5: note = misc_feature - Modified Amino Acid: 7MeW
  SITE 6: note = misc_feature - Modified Amino Acid: KAc
  SITE 7: note = misc_feature - Modified Amino Acid: Pen
  SITE 8: note = misc_feature - Modified Amino Acid: AEF
  SITE 9: note = misc_feature - Modified Amino Acid: 2Nal
  SITE 10: note = misc_feature - Modified Amino Acid: THP
  SITE 13: note = misc_feature - Modified Amino Acid: 4TriazolAla
  SITE 13: note = Mod_Res - N-terminal is: am
  REGION 2..7: note = Disulfid - Cyclic bond: Pen to Pen
RXNTWKXXXXENX

SEQ ID NO: 351 - protein, 13 aa, synthetic construct
  REGION 1..13: note = Modified peptide: 602dR
  SITE 1: note = Mod_Res - C-terminal is: ac
  SITE 1: note = misc_feature - Modified Amino Acid: dR
  SITE 2: note = misc_feature - Modified Amino Acid: Pen
  SITE 5: note = misc_feature - Modified Amino Acid: 7MeW
  SITE 6: note = misc_feature - Modified Amino Acid: KAc
  SITE 7: note = misc_feature - Modified Amino Acid: Pen
  SITE 8: note = misc_feature - Modified Amino Acid: AEF
  SITE 9: note = misc_feature - Modified Amino Acid: 2Nal
  SITE 10: note = misc_feature - Modified Amino Acid: THP
  SITE 13: note = misc_feature - Modified Amino Acid: bMePhe(2S3S)
  SITE 13: note = Mod_Res - N-terminal is: am
  REGION 2..7: note = Disulfid - Cyclic bond: Pen to Pen
RXNTWKXXXXENX

SEQ ID NO: 352 - protein, 14 aa, synthetic construct
  REGION 1..14: note = Modified peptide: 604dR
  SITE 1: note = Mod_Res - C-terminal is: ac
  SITE 1: note = misc_feature - Modified Amino Acid: dR
  SITE 2: note = misc_feature - Modified Amino Acid: Pen
  SITE 5: note = misc_feature - Modified Amino Acid: 7MeW
  SITE 6: note = misc_feature - Modified Amino Acid: KAc
  SITE 7: note = misc_feature - Modified Amino Acid: Pen
  SITE 8: note = misc_feature - Modified Amino Acid: AEF
  SITE 9: note = misc_feature - Modified Amino Acid: 2Nal
  SITE 10: note = misc_feature - Modified Amino Acid: THP
  SITE 13: note = misc_feature - Modified Amino Acid: 3Pya
  SITE 14: note = misc_feature - Modified Amino Acid: N(Cyclohexyl)Gly
  SITE 14: note = Mod_Res - N-terminal is: am
  REGION 2..7: note = Disulfid - Cyclic bond: Pen to Pen
RXNTWKXXXXENXX

SEQ ID NO: 353 - protein, 14 aa, synthetic construct
  REGION 1..14: note = Modified peptide: 607dR
  SITE 1: note = Mod_Res - C-terminal is: ac
  SITE 1: note = misc_feature - Modified Amino Acid: dR
  SITE 2: note = misc_feature - Modified Amino Acid: Pen
  SITE 5: note = misc_feature - Modified Amino Acid: 7MeW
  SITE 6: note = misc_feature - Modified Amino Acid: KAc
  SITE 7: note = misc_feature - Modified Amino Acid: Pen
  SITE 8: note = misc_feature - Modified Amino Acid: AEF
  SITE 9: note = misc_feature - Modified Amino Acid: 2Nal
  SITE 10: note = misc_feature - Modified Amino Acid: THP
  SITE 13: note = misc_feature - Modified Amino Acid: 3Pya
  SITE 14: note = misc_feature - Modified Amino Acid: N(Isobutyl)Gly
  SITE 14: note = Mod_Res - N-terminal is: am
  REGION 2..7: note = Disulfid - Cyclic bond: Pen to Pen
RXNTWKXXXXENXX

SEQ ID NO: 354 - protein, 14 aa, synthetic construct
  REGION 1..14: note = Modified peptide: 615dR
  SITE 1: note = Mod_Res - C-terminal is: ac
  SITE 1: note = misc_feature - Modified Amino Acid: dR
  SITE 2: note = misc_feature - Modified Amino Acid: AIB
  SITE 4: note = misc_feature - Modified Amino Acid: 3OHPro
  SITE 5: note = misc_feature - Modified Amino Acid: 7MeW
  SITE 6: note = misc_feature - Modified Amino Acid: KAc
  SITE 7: note = misc_feature - Modified Amino Acid: S5H
  SITE 8: note = misc_feature - Modified Amino Acid: AEF
  SITE 9: note = misc_feature - Modified Amino Acid: 2Nal
  SITE 10: note = misc_feature - Modified Amino Acid: THP
  SITE 11: note = misc_feature - Modified Amino Acid: S5H
  SITE 13: note = misc_feature - Modified Amino Acid: 3Pya
  SITE 14: note = misc_feature - Modified Amino Acid: MeGly
  SITE 14: note = Mod_Res - N-terminal is: am
  REGION 7..11: note = Disulfid - Cyclic bond: S5H to S5H
RXNXWKXXXXXNXG

SEQ ID NO: 355 - protein, 14 aa, synthetic construct
  REGION 1..14: note = Modified peptide: 616dR
  SITE 1: note = Mod_Res - C-terminal is: ac
  SITE 1: note = misc_feature - Modified Amino Acid: dR
  SITE 2: note = misc_feature - Modified Amino Acid: aMeC
  SITE 5: note = misc_feature - Modified Amino Acid: 7MeW
  SITE 6: note = misc_feature - Modified Amino Acid: KAc
  SITE 8: note = misc_feature - Modified Amino Acid: AEF
  SITE 9: note = misc_feature - Modified Amino Acid: 2Nal
  SITE 10: note = misc_feature - Modified Amino Acid: THP
  SITE 13: note = misc_feature - Modified Amino Acid: 3Pya
  SITE 14: note = misc_feature - Modified Amino Acid: MeGly
  SITE 14: note = Mod_Res - N-terminal is: am
  REGION 2..7: note = Disulfid - Cyclic bond: C to C
RCNTWKCXXXENXG

SEQ ID NO: 356 - protein, 13 aa, synthetic construct
  REGION 1..13: note = Modified peptide: 618
  SITE 1: note = Mod_Res - C-terminal is: ac
  SITE 1: note = misc_feature - Modified Amino Acid: Pen
  SITE 5: note = misc_feature - Modified Amino Acid: KAc
  SITE 6: note = misc_feature - Modified Amino Acid: Pen
  SITE 7: note = misc_feature - Modified Amino Acid: AEF
  SITE 8: note = misc_feature - Modified Amino Acid: 2Nal
  SITE 9: note = misc_feature - Modified Amino Acid: THP
  SITE 10: note = misc_feature - Modified Amino Acid: KAc
  SITE 12: note = misc_feature - Modified Amino Acid: 3Pya
  SITE 13: note = misc_feature - Modified Amino Acid: MeGly
  SITE 13: note = Mod_Res - N-terminal is: am
  REGION 1..6: note = Disulfid - Cyclic bond: Pen to Pen
XNTWKXXXXKNXG

SEQ ID NO: 357 - protein, 13 aa, synthetic construct
  REGION 1..13: note = Modified peptide: 632
  SITE 1: note = Mod_Res - C-terminal is: ac
  SITE 1: note = misc_feature - Modified Amino Acid: aMeC
  SITE 4: note = misc_feature - Modified Amino Acid: 7MeW
  SITE 5: note = misc_feature - Modified Amino Acid: KAc
  SITE 7: note = misc_feature - Modified Amino Acid: AEF
  SITE 8: note = misc_feature - Modified Amino Acid: 2Nal
  SITE 9: note = misc_feature - Modified Amino Acid: THP
  SITE 12: note = misc_feature - Modified Amino Acid: 3Pya
  SITE 13: note = misc_feature - Modified Amino Acid: MeGly
  SITE 13: note = Mod_Res - N-terminal is: am
  REGION 1..6: note = Disulfid - Cyclic bond: C to C
CNTWKCXXXENXG

SEQ ID NO: 358 - protein, 14 aa, synthetic construct
  REGION 1..14: note = Modified peptide: 641dR
  SITE 1: note = Mod_Res - C-terminal is: ac
  SITE 1: note = misc_feature - Modified Amino Acid: dR
  SITE 2: note = misc_feature - Modified Amino Acid: Pen
  SITE 5: note = misc_feature - Modified Amino Acid: 7MeW
  SITE 6: note = misc_feature - Modified Amino Acid: KAc
  SITE 7: note = misc_feature - Modified Amino Acid: Pen
  SITE 9: note = misc_feature - Modified Amino Acid: 2Nal
  SITE 10: note = misc_feature - Modified Amino Acid: THP
  SITE 13: note = misc_feature - Modified Amino Acid: 3Pya
  SITE 14: note = misc_feature - Modified Amino Acid: MeGly
  SITE 14: note = Mod_Res - N-terminal is: am
  REGION 2..7: note = Disulfid - Cyclic bond: Pen to Pen
RXNTWKXAXXENXG

SEQ ID NO: 359 - protein, 14 aa, synthetic construct
  REGION 1..14: note = Modified peptide: 642dR
  SITE 1: note = Mod_Res - C-terminal is: ac
  SITE 1: note = misc_feature - Modified Amino Acid: dR
  SITE 2: note = misc_feature - Modified Amino Acid: Pen
  SITE 6: note = misc_feature - Modified Amino Acid: KAc
  SITE 7: note = misc_feature - Modified Amino Acid: Pen
  SITE 8: note = misc_feature - Modified Amino Acid: AEF
  SITE 9: note = misc_feature - Modified Amino Acid: 2Nal
  SITE 10: note = misc_feature - Modified Amino Acid: THP
  SITE 13: note = misc_feature - Modified Amino Acid: 3Pya
  SITE 14: note = misc_feature - Modified Amino Acid: MeGly
  SITE 14: note = Mod_Res - N-terminal is: am
  REGION 2..7: note = Disulfid - Cyclic bond: Pen to Pen
RXNTAKXXXXENXG

SEQ ID NO: 360 - protein, 14 aa, synthetic construct
  REGION 1..14: note = Modified peptide: 643dR
  SITE 1: note = Mod_Res - C-terminal is: ac
  SITE 1: note = misc_feature - Modified Amino Acid: dR
  SITE 2: note = misc_feature - Modified Amino Acid: Pen
  SITE 5: note = misc_feature - Modified Amino Acid: 7MeW
  SITE 6: note = misc_feature - Modified Amino Acid: KAc
  SITE 7: note = misc_feature - Modified Amino Acid: Pen
  SITE 8: note = misc_feature - Modified Amino Acid: AEF
  SITE 10: note = misc_feature - Modified Amino Acid: THP
  SITE 13: note = misc_feature - Modified Amino Acid: 3Pya
  SITE 14: note = misc_feature - Modified Amino Acid: MeGly
  SITE 14: note = Mod_Res - N-terminal is: am
  REGION 2..7: note = Disulfid - Cyclic bond: Pen to Pen
RXNTWKXXAXENXG

SEQ ID NO: 361 - protein, 14 aa, synthetic construct
  REGION 1..14: note = Modified peptide: 644dR
  SITE 1: note = Mod_Res - C-terminal is: BHCO
  SITE 1: note = misc_feature - Modified Amino Acid: dR
  SITE 2: note = misc_feature - Modified Amino Acid: Pen
  SITE 5: note = misc_feature - Modified Amino Acid: 7MeW
  SITE 6: note = misc_feature - Modified Amino Acid: KAc
  SITE 7: note = misc_feature - Modified Amino Acid: Pen
  SITE 8: note = misc_feature - Modified Amino Acid: AEF(Ac)
  SITE 9: note = misc_feature - Modified Amino Acid: 2Nal
  SITE 10: note = misc_feature - Modified Amino Acid: THP
  SITE 13: note = misc_feature - Modified Amino Acid: 3Pya
  SITE 14: note = misc_feature - Modified Amino Acid: MeGly
  SITE 14: note = Mod_Res - N-terminal is: am
  REGION 2..7: note = Disulfid - Cyclic bond: Pen to Pen
RXNTWKXXXXENXG

SEQ ID NO: 362 - protein, 13 aa, synthetic construct
  REGION 1..13: note = Modified peptide: 645dR
  SITE 1: note = Mod_Res - C-terminal is: ac
  SITE 1: note = misc_feature - Modified Amino Acid: dR
  SITE 2: note = misc_feature - Modified Amino Acid: Pen
  SITE 5: note = misc_feature - Modified Amino Acid: 7MeW
  SITE 6: note = misc_feature - Modified Amino Acid: KAc
  SITE 7: note = misc_feature - Modified Amino Acid: Pen
  SITE 8: note = misc_feature - Modified Amino Acid: AEF
  SITE 9: note = misc_feature - Modified Amino Acid: 2Nal
  SITE 10: note = misc_feature - Modified Amino Acid: THP
  SITE 13: note = misc_feature - Modified Amino Acid: 2AmTyr
  SITE 13: note = Mod_Res - N-terminal is: am
  REGION 2..7: note = Disulfid - Cyclic bond: Pen to Pen
RXNTWKXXXXENY

SEQ ID NO: 363 - protein, 14 aa, synthetic construct
  REGION 1..14: note = Modified peptide: 647dR
  SITE 1: note = Mod_Res - C-terminal is: ac
  SITE 1: note = misc_feature - Modified Amino Acid: dR
  SITE 2: note = misc_feature - Modified Amino Acid: Pen
  SITE 5: note = misc_feature - Modified Amino Acid: 7MeW
  SITE 6: note = misc_feature - Modified Amino Acid: KAc
  SITE 7: note = misc_feature - Modified Amino Acid: Pen
  SITE 8: note = misc_feature - Modified Amino Acid: AEF
  SITE 9: note = misc_feature - Modified Amino Acid: 2Nal
  SITE 10: note = misc_feature - Modified Amino Acid: THP
  SITE 13: note = misc_feature - Modified Amino Acid: 6OH3Pya
  SITE 14: note = misc_feature - Modified Amino Acid: MeGly
  SITE 14: note = Mod_Res - N-terminal is: am
  REGION 2..7: note = Disulfid - Cyclic bond: Pen to Pen
RXNTWKXXXXENXG

SEQ ID NO: 364 - protein, 14 aa, synthetic construct
  REGION 1..14: note = Modified peptide: 650dR
  SITE 1: note = Mod_Res - C-terminal is: NH2
  SITE 1: note = misc_feature - Modified Amino Acid: dR
  SITE 2: note = misc_feature - Modified Amino Acid: Pen
  SITE 5: note = misc_feature - Modified Amino Acid: 7MeW
  SITE 6: note = misc_feature - Modified Amino Acid: KAc
  SITE 7: note = misc_feature - Modified Amino Acid: Pen
  SITE 8: note = misc_feature - Modified Amino Acid: AEF(Ac)
  SITE 9: note = misc_feature - Modified Amino Acid: 2Nal
  SITE 10: note = misc_feature - Modified Amino Acid: THP
  SITE 13: note = misc_feature - Modified Amino Acid: 3Pya
  SITE 14: note = misc_feature - Modified Amino Acid: MeGly
  SITE 14: note = Mod_Res - N-terminal is: am
  REGION 2..7: note = Disulfid - Cyclic bond: Pen to Pen
RXNTWKXXXXENXG

SEQ ID NO: 365 - protein, 14 aa, synthetic construct
  REGION 1..14: note = Modified peptide: 652dR
  SITE 1: note = Mod_Res - C-terminal is: ac
  SITE 1: note = misc_feature - Modified Amino Acid: dR
  SITE 2: note = misc_feature - Modified Amino Acid: Pen
  SITE 5: note = misc_feature - Modified Amino Acid: 7MeW
  SITE 6: note = misc_feature - Modified Amino Acid: KAc
  SITE 7: note = misc_feature - Modified Amino Acid: Pen
  SITE 8: note = misc_feature - Modified Amino Acid: AEF
  SITE 9: note = misc_feature - Modified Amino Acid: 2Nal
  SITE 10: note = misc_feature - Modified Amino Acid: THP
  SITE 14: note = misc_feature - Modified Amino Acid: MeGly
  SITE 14: note = Mod_Res - N-terminal is: am
  REGION 2..7: note = Disulfid - Cyclic bond: Pen to Pen
RXNTWKXXXXENAG

SEQ ID NO: 366 - protein, 14 aa, synthetic construct
  REGION 1..14: note = Modified peptide: 691dR
  SITE 1: note = Mod_Res - C-terminal is: ac
  SITE 1: note = misc_feature - Modified Amino Acid: dR
  SITE 2: note = misc_feature - Modified Amino Acid: Pen
  SITE 5: note = misc_feature - Modified Amino Acid: 7MeW
  SITE 6: note = misc_feature - Modified Amino Acid: KAc
  SITE 7: note = misc_feature - Modified Amino Acid: Pen
  SITE 8: note = misc_feature - Modified Amino Acid: AEF
  SITE 9: note = misc_feature - Modified Amino Acid: 2Nal
  SITE 10: note = misc_feature - Modified Amino Acid: THP
  SITE 11: note = misc_feature - Modified Amino Acid: KAc
  SITE 13: note = misc_feature - Modified Amino Acid: 3Pya
  SITE 14: note = misc_feature - Modified Amino Acid: N(3AmBenzyl)Gly
  SITE 14: note = Mod_Res - N-terminal is: am
  REGION 2..7: note = Disulfid - Cyclic bond: Pen to Pen
RXNTWKXXXXKNXX

SEQ ID NO: 367 - protein, 14 aa, synthetic construct
  REGION 1..14: note = Modified peptide: 716dR
  SITE 1: note = Mod_Res - C-terminal is: ac
  SITE 1: note = misc_feature - Modified Amino Acid: dR
  SITE 2: note = misc_feature - Modified Amino Acid: Pen
  SITE 5: note = misc_feature - Modified Amino Acid: 7MeW
  SITE 6: note = misc_feature - Modified Amino Acid: KAc
  SITE 7: note = misc_feature - Modified Amino Acid: Pen
  SITE 8: note = misc_feature - Modified Amino Acid: bMeAEF(2S3R*)
  SITE 9: note = misc_feature - Modified Amino Acid: 2Nal
  SITE 10: note = misc_feature - Modified Amino Acid: THP
  SITE 13: note = misc_feature - Modified Amino Acid: 3Pya
  SITE 14: note = misc_feature - Modified Amino Acid: MeGly
  SITE 14: note = Mod_Res - N-terminal is: am
  REGION 2..7: note = Disulfid - Cyclic bond: Pen to Pen
RXNTWKXXXXENXG

SEQ ID NO: 368 - protein, 14 aa, synthetic construct
  REGION 1..14: note = Modified peptide: 717dR
  SITE 1: note = Mod_Res - C-terminal is: ac
  SITE 1: note = misc_feature - Modified Amino Acid: dR
  SITE 2: note = misc_feature - Modified Amino Acid: Pen
  SITE 5: note = misc_feature - Modified Amino Acid: 7MeW
  SITE 6: note = misc_feature - Modified Amino Acid: KAc
  SITE 7: note = misc_feature - Modified Amino Acid: Pen
  SITE 8: note = misc_feature - Modified Amino Acid: bMeAEF(2S3S*)
  SITE 9: note = misc_feature - Modified Amino Acid: 2Nal
  SITE 10: note = misc_feature - Modified Amino Acid: THP
  SITE 13: note = misc_feature - Modified Amino Acid: 3Pya
  SITE 14: note = misc_feature - Modified Amino Acid: MeGly
  SITE 14: note = Mod_Res - N-terminal is: am
  REGION 2..7: note = Disulfid - Cyclic bond: Pen to Pen
RXNTWKXXXXENXG

SEQ ID NO: 369 - protein, 14 aa, synthetic construct
  REGION 1..14: note = Modified peptide: 734dR
  SITE 1: note = Mod_Res - C-terminal is: ac
  SITE 1: note = misc_feature - Modified Amino Acid: dR
  SITE 2: note = misc_feature - Modified Amino Acid: Pen
  SITE 5: note = misc_feature - Modified Amino Acid: 7MeW
  SITE 6: note = misc_feature - Modified Amino Acid: KAc
  SITE 7: note = misc_feature - Modified Amino Acid: Pen
  SITE 8: note = misc_feature - Modified Amino Acid: AEF
  SITE 9: note = misc_feature - Modified Amino Acid: 2Nal
  SITE 10: note = misc_feature - Modified Amino Acid: THP
  SITE 11: note = misc_feature - Modified Amino Acid: KAc
  SITE 13: note = misc_feature - Modified Amino Acid: 3Pya
  SITE 14: note = misc_feature - Modified Amino Acid: N(4AmBenzyl)Gly
  SITE 14: note = Mod_Res - N-terminal is: am
  REGION 2..7: note = Disulfid - Cyclic bond: Pen to Pen
RXNTWKXXXXKNXX

SEQ ID NO: 370 - protein, 13 aa, synthetic construct
  REGION 1..13: note = Modified peptide: 784
  SITE 1: note = Mod_Res - C-terminal is: ac
  SITE 1: note = misc_feature - Modified Amino Acid: Pen
  SITE 4: note = misc_feature - Modified Amino Acid: 7MeW
  SITE 5: note = misc_feature - Modified Amino Acid: KAc
  SITE 6: note = misc_feature - Modified Amino Acid: Pen
  SITE 7: note = misc_feature - Modified Amino Acid: AEF
  SITE 8: note = misc_feature - Modified Amino Acid: 2Nal
  SITE 9: note = misc_feature - Modified Amino Acid: THP
  SITE 12: note = misc_feature - Modified Amino Acid: 3Pya
  SITE 13: note = misc_feature - Modified Amino Acid: MeGly
  SITE 13: note = Mod_Res - N-terminal is: am
  REGION 1..6: note = Disulfid - Cyclic bond: Pen to Pen
XNTWKXXXXKNXG

SEQ ID NO: 371 - protein, 13 aa, synthetic construct
  REGION 1..13: note = Modified peptide: 794
  SITE 1: note = Mod_Res - C-terminal is: ac
  SITE 1: note = misc_feature - Modified Amino Acid: Pen
  SITE 4: note = misc_feature - Modified Amino Acid: 7MeW
  SITE 5: note = misc_feature - Modified Amino Acid: KAc
  SITE 6: note = misc_feature - Modified Amino Acid: Pen
  SITE 7: note = misc_feature - Modified Amino Acid: AEF
  SITE 8: note = misc_feature - Modified Amino Acid: 2Nal
  SITE 9: note = misc_feature - Modified Amino Acid: THP
  SITE 12: note = misc_feature - Modified Amino Acid: 3Pya
  SITE 13: note = misc_feature - Modified Amino Acid: MeGly
  SITE 13: note = Mod_Res - N-terminal is: am
  REGION 1..6: note = Disulfid - Cyclic bond: Pen to Pen
XNTWKXXXXKNXG

SEQ ID NO: 372 - protein, 13 aa, synthetic construct
  REGION 1..13: note = Modified peptide: 798
  SITE 1: note = Mod_Res - C-terminal is: ac
  SITE 1: note = misc_feature - Modified Amino Acid: Pen
  SITE 4: note = misc_feature - Modified Amino Acid: 7MeW
  SITE 5: note = misc_feature - Modified Amino Acid: KAc
  SITE 6: note = misc_feature - Modified Amino Acid: Pen
  SITE 7: note = misc_feature - Modified Amino Acid: AEF
  SITE 8: note = misc_feature - Modified Amino Acid: 2Nal
  SITE 9: note = misc_feature - Modified Amino Acid: THP
  SITE 12: note = misc_feature - Modified Amino Acid: 3Pya
  SITE 13: note = misc_feature - Modified Amino Acid: MeGly
  SITE 13: note = Mod_Res - N-terminal is: am
  REGION 1..6: note = Disulfid - Cyclic bond: Pen to Pen
XNTWKXXXXKNXG

SEQ ID NO: 373 - protein, 14 aa, synthetic construct
  REGION 1..14: note = Modified peptide: 807dR
  SITE 1: note = Mod_Res - C-terminal is: ac
  SITE 1: note = misc_feature - Modified Amino Acid: dR
  SITE 2: note = misc_feature - Modified Amino Acid: Pen
  SITE 5: note = misc_feature - Modified Amino Acid: 7PyrW
  SITE 6: note = misc_feature - Modified Amino Acid: KAc
  SITE 7: note = misc_feature - Modified Amino Acid: Pen
  SITE 8: note = misc_feature - Modified Amino Acid: AEF
  SITE 9: note = misc_feature - Modified Amino Acid: 2Nal
  SITE 10: note = misc_feature - Modified Amino Acid: THP
  SITE 13: note = misc_feature - Modified Amino Acid: 3Pya
  SITE 14: note = misc_feature - Modified Amino Acid: MeGly
  SITE 14: note = Mod_Res - N-terminal is: am
  REGION 2..7: note = Disulfid - Cyclic bond: Pen to Pen
RXNTWKXXXXENXG

SEQ ID NO: 374 - protein, 13 aa, synthetic construct
  REGION 1..13: note = Modified peptide: 821dR
  SITE 1: note = Mod_Res - C-terminal is: ac
  SITE 1: note = misc_feature - Modified Amino Acid: dR
  SITE 2: note = misc_feature - Modified Amino Acid: Pen
  SITE 5: note = misc_feature - Modified Amino Acid: 7MeW
  SITE 6: note = misc_feature - Modified Amino Acid: KAc
  SITE 7: note = misc_feature - Modified Amino Acid: Pen
  SITE 8: note = misc_feature - Modified Amino Acid: AEF
  SITE 9: note = misc_feature - Modified Amino Acid: 2Nal
  SITE 10: note = misc_feature - Modified Amino Acid: THP
  SITE 13: note = misc_feature - Modified Amino Acid: bMeH(2S3S*)
  SITE 13: note = Mod_Res - N-terminal is: am
  REGION 2..7: note = Disulfid - Cyclic bond: Pen to Pen
RXNTWKXXXXENX

SEQ ID NO: 375 - protein, 13 aa, synthetic construct
  REGION 1..13: note = Modified peptide: 828
  SITE 1: note = Mod_Res - C-terminal is: ac
  SITE 1: note = misc_feature - Modified Amino Acid: Pen
  SITE 4: note = misc_feature - Modified Amino Acid: 7MeW
  SITE 5: note = misc_feature - Modified Amino Acid: KAc
  SITE 6: note = misc_feature - Modified Amino Acid: Pen
  SITE 7: note = misc_feature - Modified Amino Acid: AEF
  SITE 8: note = misc_feature - Modified Amino Acid: 2Nal
  SITE 9: note = misc_feature - Modified Amino Acid: THP
  SITE 12: note = misc_feature - Modified Amino Acid: 3Pya
  SITE 13: note = misc_feature - Modified Amino Acid: MeGly
  SITE 13: note = Mod_Res - N-terminal is: am
  REGION 1..6: note = Disulfid - Cyclic bond: Pen to Pen
XNTWKXXXXKNXG

SEQ ID NO: 376 - protein, 14 aa, synthetic construct
  REGION 1..14: note = Modified peptide: 829dK(PEG6Biotin)
  SITE 1: note = Mod_Res - C-terminal is: ac
  SITE 1: note = misc_feature - Modified Amino Acid: dK
  SITE 2: note = misc_feature - Modified Amino Acid: Pen
  SITE 5: note = misc_feature - Modified Amino Acid: 7MeW
  SITE 6: note = misc_feature - Modified Amino Acid: KAc
  SITE 7: note = misc_feature - Modified Amino Acid: Pen
  SITE 8: note = misc_feature - Modified Amino Acid: AEF
  SITE 9: note = misc_feature - Modified Amino Acid: 2Nal
  SITE 10: note = misc_feature - Modified Amino Acid: THP
  SITE 13: note = misc_feature - Modified Amino Acid: 3Pya
  SITE 14: note = misc_feature - Modified Amino Acid: MeGly
  SITE 14: note = Mod_Res - N-terminal is: am
  REGION 2..7: note = Disulfid - Cyclic bond: Pen to Pen
KXNTWKXXXXKNXG

SEQ ID NO: 377 - protein, 14 aa, synthetic construct
  REGION 1..14: note = Modified peptide: 837PEG6
  SITE 1: note = Mod_Res - C-terminal is: Biotin
  SITE 1: note = misc_feature - Modified Amino Acid: PEG6
  SITE 2: note = misc_feature - Modified Amino Acid: Pen
  SITE 5: note = misc_feature - Modified Amino Acid: 7MeW
  SITE 6: note = misc_feature - Modified Amino Acid: KAc
  SITE 7: note = misc_feature - Modified Amino Acid: Pen
  SITE 8: note = misc_feature - Modified Amino Acid: AEF
  SITE 9: note = misc_feature - Modified Amino Acid: 2Nal
  SITE 10: note = misc_feature - Modified Amino Acid: THP
  SITE 13: note = misc_feature - Modified Amino Acid: 3Pya
  SITE 14: note = misc_feature - Modified Amino Acid: MeGly
  SITE 14: note = Mod_Res - N-terminal is: am
  REGION 2..7: note = Disulfid - Cyclic bond: Pen to Pen
XXNTWKXXXXKNXG

SEQ ID NO: 378 - protein, 14 aa, synthetic construct
  REGION 1..14: note = Modified peptide: 843gEPEG6
  SITE 1: note = Mod_Res - C-terminal is: Biotin
  SITE 1: note = misc_feature - Modified Amino Acid: gEPEG6
  SITE 2: note = misc_feature - Modified Amino Acid: Pen
  SITE 5: note = misc_feature - Modified Amino Acid: 7MeW
  SITE 6: note = misc_feature - Modified Amino Acid: KAc
  SITE 7: note = misc_feature - Modified Amino Acid: Pen
  SITE 8: note = misc_feature - Modified Amino Acid: AEF
  SITE 9: note = misc_feature - Modified Amino Acid: 2Nal
  SITE 10: note = misc_feature - Modified Amino Acid: THP
  SITE 13: note = misc_feature - Modified Amino Acid: 3Pya
  SITE 14: note = misc_feature - Modified Amino Acid: MeGly
  SITE 14: note = Mod_Res - N-terminal is: am
  REGION 2..7: note = Disulfid - Cyclic bond: Pen to Pen
XXNTWKXXXXKNXG

SEQ ID NO: 379 - protein, 13 aa, synthetic construct
  REGION 1..13: note = Modified peptide: 854
  SITE 1: note = Mod_Res - C-terminal is: ac
  SITE 1: note = misc_feature - Modified Amino Acid: Pen
  SITE 4: note = misc_feature - Modified Amino Acid: 7MeW
  SITE 5: note = misc_feature - Modified Amino Acid: KAc
  SITE 6: note = misc_feature - Modified Amino Acid: Pen
  SITE 7: note = misc_feature - Modified Amino Acid: AEF
  SITE 8: note = misc_feature - Modified Amino Acid: 2Nal
  SITE 9: note = misc_feature - Modified Amino Acid: THP
  SITE 10: note = misc_feature - Modified Amino Acid: KAc
  SITE 12: note = misc_feature - Modified Amino Acid: 3Pya
  SITE 13: note = misc_feature - Modified Amino Acid: MeGly
  SITE 13: note = Mod_Res - N-terminal is: am
  REGION 1..6: note = Disulfid - Cyclic bond: Pen to Pen
XNTWKXXXXKNXG

SEQ ID NO: 380 - protein, 13 aa, synthetic construct
  REGION 1..13: note = Modified peptide: 856dR
  SITE 1: note = Mod_Res - C-terminal is: ac
  SITE 1: note = misc_feature - Modified Amino Acid: dR
  SITE 2: note = misc_feature - Modified Amino Acid: Pen
  SITE 5: note = misc_feature - Modified Amino Acid: 7MeW
  SITE 6: note = misc_feature - Modified Amino Acid: KAc
  SITE 7: note = misc_feature - Modified Amino Acid: Pen
  SITE 8: note = misc_feature - Modified Amino Acid: AEF
  SITE 9: note = misc_feature - Modified Amino Acid: 2Nal
  SITE 10: note = misc_feature - Modified Amino Acid: THP
  SITE 13: note = misc_feature - Modified Amino Acid: 5MeH
  SITE 13: note = Mod_Res - N-terminal is: am
  REGION 2..7: note = Disulfid - Cyclic bond: Pen to Pen
RXNTWKXXXXENH

SEQ ID NO: 381 - protein, 14 aa, synthetic construct
  REGION 1..14: note = Modified peptide: 863dK(PEG2PEG2Biotin)
  SITE 1: note = Mod_Res - C-terminal is: ac
  SITE 1: note = misc_feature - Modified Amino Acid: dK
  SITE 2: note = misc_feature - Modified Amino Acid: Pen
  SITE 5: note = misc_feature - Modified Amino Acid: 7MeW
  SITE 6: note = misc_feature - Modified Amino Acid: KAc
  SITE 7: note = misc_feature - Modified Amino Acid: Pen
  SITE 8: note = misc_feature - Modified Amino Acid: AEF
  SITE 9: note = misc_feature - Modified Amino Acid: 2Nal
  SITE 10: note = misc_feature - Modified Amino Acid: THP
  SITE 11: note = misc_feature - Modified Amino Acid: KAc
  SITE 13: note = misc_feature - Modified Amino Acid: 3Pya
  SITE 14: note = misc_feature - Modified Amino Acid: MeGly
  SITE 14: note = Mod_Res - N-terminal is: am
  REGION 2..7: note = Disulfid - Cyclic bond: Pen to Pen
KXNTWKXXXXKNXG

SEQ ID NO: 382 - protein, 13 aa, synthetic construct
  REGION 1..13: note = Modified peptide: 864
  SITE 1: note = Mod_Res - C-terminal is: BiotinPEG2PEG2CO
  SITE 1: note = misc_feature - Modified Amino Acid: Pen
  SITE 4: note = misc_feature - Modified Amino Acid: 7MeW
  SITE 5: note = misc_feature - Modified Amino Acid: KAc
  SITE 6: note = misc_feature - Modified Amino Acid: Pen
  SITE 7: note = misc_feature - Modified Amino Acid: AEF
  SITE 8: note = misc_feature - Modified Amino Acid: 2Nal
  SITE 9: note = misc_feature - Modified Amino Acid: THP
  SITE 10: note = misc_feature - Modified Amino Acid: KAc
  SITE 12: note = misc_feature - Modified Amino Acid: 3Pya
  SITE 13: note = misc_feature - Modified Amino Acid: MeGly
  SITE 13: note = Mod_Res - N-terminal is: am
  REGION 1..6: note = Disulfid - Cyclic bond: Pen to Pen
XNTWKXXXXKNXG

SEQ ID NO: 383 - protein, 14 aa, synthetic construct
  REGION 1..14: note = Modified peptide: 874PEG6
  SITE 1: note = Mod_Res - C-terminal is: Biotin
  SITE 1: note = misc_feature - Modified Amino Acid: PEG6
  SITE 2: note = misc_feature - Modified Amino Acid: Pen
  SITE 5: note = misc_feature - Modified Amino Acid: 7MeW
  SITE 6: note = misc_feature - Modified Amino Acid: KAc
  SITE 7: note = misc_feature - Modified Amino Acid: Pen
  SITE 8: note = misc_feature - Modified Amino Acid: AEF
  SITE 9: note = misc_feature - Modified Amino Acid: 2Nal
  SITE 10: note = misc_feature - Modified Amino Acid: THP
  SITE 13: note = misc_feature - Modified Amino Acid: 3Pya
  SITE 14: note = misc_feature - Modified Amino Acid: MeGly
  SITE 14: note = Mod_Res - N-terminal is: am
  REGION 2..7: note = Disulfid - Cyclic bond: Pen to Pen
XXNTWKXXXXKNXG

SEQ ID NO: 384 - protein, 13 aa, synthetic construct
  REGION 1..13: note = Modified peptide: 892
  SITE 1: note = Mod_Res - C-terminal is: ac
  SITE 1: note = misc_feature - Modified Amino Acid: Pen
  SITE 4: note = misc_feature - Modified Amino Acid: 7MeW
  SITE 5: note = misc_feature - Modified Amino Acid: KAc
  SITE 6: note = misc_feature - Modified Amino Acid: Pen
  SITE 7: note = misc_feature - Modified Amino Acid: AEF
  SITE 8: note = misc_feature - Modified Amino Acid: 2Nal
  SITE 9: note = misc_feature - Modified Amino Acid: THP
  SITE 10: note = misc_feature - Modified Amino Acid: Dpr
  SITE 12: note = misc_feature - Modified Amino Acid: 3Pya
  SITE 13: note = misc_feature - Modified Amino Acid: MeGly
  SITE 13: note = Mod_Res - N-terminal is: am
  REGION 1..6: note = Disulfid - Cyclic bond: Pen to Pen
XNTWKXXXXXNXG

SEQ ID NO: 385 - protein, 13 aa, synthetic construct
  REGION 1..13: note = Modified peptide: 894
  SITE 1: note = Mod_Res - C-terminal is: ac
  SITE 1: note = misc_feature - Modified Amino Acid: Pen
  SITE 4: note = misc_feature - Modified Amino Acid: 7BrW
  SITE 5: note = misc_feature - Modified Amino Acid: KAc
  SITE 6: note = misc_feature - Modified Amino Acid: Pen
  SITE 7: note = misc_feature - Modified Amino Acid: AEF
  SITE 8: note = misc_feature - Modified Amino Acid: 2Nal
  SITE 9: note = misc_feature - Modified Amino Acid: THP
  SITE 12: note = misc_feature - Modified Amino Acid: 3Pya
  SITE 13: note = misc_feature - Modified Amino Acid: MeGly
  SITE 13: note = Mod_Res - N-terminal is: am
  REGION 1..6: note = Disulfid - Cyclic bond: Pen to Pen
XNTWKXXXXENXG

SEQ ID NO: 386 - protein, 13 aa, synthetic construct
  REGION 1..13: note = Modified peptide: 898
  SITE 1: note = Mod_Res - C-terminal is: ac
  SITE 1: note = misc_feature - Modified Amino Acid: Pen
  SITE 2: note = misc_feature - Modified Amino Acid: K(PEG2PEG2Biotin)
  SITE 4: note = misc_feature - Modified Amino Acid: 7MeW
  SITE 5: note = misc_feature - Modified Amino Acid: KAc
  SITE 6: note = misc_feature - Modified Amino Acid: Pen
  SITE 7: note = misc_feature - Modified Amino Acid: AEF
  SITE 8: note = misc_feature - Modified Amino Acid: 2Nal
  SITE 9: note = misc_feature - Modified Amino Acid: THP
  SITE 10: note = misc_feature - Modified Amino Acid: KAc
  SITE 12: note = misc_feature - Modified Amino Acid: 3Pya
  SITE 13: note = misc_feature - Modified Amino Acid: MeGly
  SITE 13: note = Mod_Res - N-terminal is: am
  REGION 1..6: note = Disulfid - Cyclic bond: Pen to Pen
XXTWKXXXXKNXG

SEQ ID NO: 387 - protein, 14 aa, synthetic construct
  REGION 1..14: note = Modified peptide: 927dK(dPEG12AcVitE)
  SITE 1: note = Mod_Res - C-terminal is: ac
  SITE 1: note = misc_feature - Modified Amino Acid: dK
  SITE 2: note = misc_feature - Modified Amino Acid: Pen
  SITE 5: note = misc_feature - Modified Amino Acid: 7MeW
  SITE 6: note = misc_feature - Modified Amino Acid: KAc
  SITE 7: note = misc_feature - Modified Amino Acid: Pen
  SITE 8: note = misc_feature - Modified Amino Acid: AEF
  SITE 9: note = misc_feature - Modified Amino Acid: 2Nal
  SITE 10: note = misc_feature - Modified Amino Acid: THP
  SITE 11: note = misc_feature - Modified Amino Acid: KAc
  SITE 13: note = misc_feature - Modified Amino Acid: 3Pya
  SITE 14: note = misc_feature - Modified Amino Acid: MeGly
  SITE 14: note = Mod_Res - N-terminal is: am
  REGION 2..7: note = Disulfid - Cyclic bond: Pen to Pen
KXNTWKXXXXKNXG

SEQ ID NO: 388 - protein, 14 aa, synthetic construct
  REGION 1..14: note = Modified peptide: 928dK(gGdPEG12AcVitE)
  SITE 1: note = Mod_Res - C-terminal is: ac
  SITE 1: note = misc_feature - Modified Amino Acid: dK
  SITE 2: note = misc_feature - Modified Amino Acid: Pen
  SITE 5: note = misc_feature - Modified Amino Acid: 7MeW
  SITE 6: note = misc_feature - Modified Amino Acid: KAc
  SITE 7: note = misc_feature - Modified Amino Acid: Pen
  SITE 8: note = misc_feature - Modified Amino Acid: AEF
  SITE 9: note = misc_feature - Modified Amino Acid: 2Nal
  SITE 10: note = misc_feature - Modified Amino Acid: THP
  SITE 11: note = misc_feature - Modified Amino Acid: KAc
  SITE 13: note = misc_feature - Modified Amino Acid: 3Pya
  SITE 14: note = misc_feature - Modified Amino Acid: MeGly
  SITE 14: note = Mod_Res - N-terminal is: am
  REGION 2..7: note = Disulfid - Cyclic bond: Pen to Pen
KXNTWKXXXXKNXG

SEQ ID NO: 389 - protein, 13 aa, synthetic construct
  REGION 1..13: note = Modified peptide: 947
  SITE 1: note = Mod_Res - C-terminal is: ac
  SITE 1: note = misc_feature - Modified Amino Acid: Pen
  SITE 4: note = misc_feature - Modified Amino Acid: 7(2ClPh)W
  SITE 5: note = misc_feature - Modified Amino Acid: KAc
  SITE 6: note = misc_feature - Modified Amino Acid: Pen
  SITE 7: note = misc_feature - Modified Amino Acid: AEF
  SITE 8: note = misc_feature - Modified Amino Acid: 2Nal
  SITE 9: note = misc_feature - Modified Amino Acid: THP
  SITE 12: note = misc_feature - Modified Amino Acid: 3Pya
  SITE 13: note = misc_feature - Modified Amino Acid: MeGly
  SITE 13: note = Mod_Res - N-terminal is: am
  REGION 1..6: note = Disulfid - Cyclic bond: Pen to Pen
XNTXKXXXXENXG

SEQ ID NO: 390 - protein, 13 aa, synthetic construct
  REGION 1..13: note = Modified peptide: 948
  SITE 1: note = Mod_Res - C-terminal is: ac
  SITE 1: note = misc_feature - Modified Amino Acid: Pen
  SITE 4: note = misc_feature - Modified Amino Acid: 7(4CF3Ph)W
  SITE 5: note = misc_feature - Modified Amino Acid: KAc
  SITE 6: note = misc_feature - Modified Amino Acid: Pen
  SITE 7: note = misc_feature - Modified Amino Acid: AEF
  SITE 8: note = misc_feature - Modified Amino Acid: 2Nal
  SITE 9: note = misc_feature - Modified Amino Acid: THP
  SITE 12: note = misc_feature - Modified Amino Acid: 3Pya
  SITE 13: note = misc_feature - Modified Amino Acid: MeGly
  SITE 13: note = Mod_Res - N-terminal is: am
  REGION 1..6: note = Disulfid - Cyclic bond: Pen to Pen
XNTXKXXXXENXG

SEQ ID NO: 391 - protein, 13 aa, synthetic construct
  REGION 1..13: note = Modified peptide: 953
  SITE 1: note = Mod_Res - C-terminal is: ac
  SITE 4: note = misc_feature - Modified Amino Acid: 7MeW
  SITE 5: note = misc_feature - Modified Amino Acid: KAc
  SITE 7: note = misc_feature - Modified Amino Acid: AEF
  SITE 8: note = misc_feature - Modified Amino Acid: 2Nal
  SITE 9: note = misc_feature - Modified Amino Acid: THP
  SITE 12: note = misc_feature - Modified Amino Acid: 3Pya
  SITE 13: note = misc_feature - Modified Amino Acid: MeGly
  SITE 13: note = Mod_Res - N-terminal is: am
ANTWKAXXXENXG

SEQ ID NO: 392 - protein, 13 aa, synthetic construct
  REGION 1..13: note = Modified peptide: 973
  SITE 1: note = Mod_Res - C-terminal is: ac
  SITE 1: note = misc_feature - Modified Amino Acid: Pen
  SITE 4: note = misc_feature - Modified Amino Acid: 7(3CF3TAZP)W
  SITE 5: note = misc_feature - Modified Amino Acid: KAc
  SITE 6: note = misc_feature - Modified Amino Acid: Pen
  SITE 7: note = misc_feature - Modified Amino Acid: AEF
  SITE 8: note = misc_feature - Modified Amino Acid: 2Nal
  SITE 9: note = misc_feature - Modified Amino Acid: THP
  SITE 12: note = misc_feature - Modified Amino Acid: 3Pya
  SITE 13: note = misc_feature - Modified Amino Acid: MeGly
  SITE 13: note = Mod_Res - N-terminal is: am
  REGION 1..6: note = Disulfid - Cyclic bond: Pen to Pen
XNTXKXXXXENXG

SEQ ID NO: 393 - protein, 13 aa, synthetic construct
  REGION 1..13: note = Modified peptide: 974
  SITE 1: note = Mod_Res - C-terminal is: ac
  SITE 1: note = misc_feature - Modified Amino Acid: Pen
  SITE 4: note = misc_feature - Modified Amino Acid: 7(4NAcPh)W
  SITE 5: note = misc_feature - Modified Amino Acid: KAc
  SITE 6: note = misc_feature - Modified Amino Acid: Pen
  SITE 7: note = misc_feature - Modified Amino Acid: AEF
  SITE 8: note = misc_feature - Modified Amino Acid: 2Nal
  SITE 9: note = misc_feature - Modified Amino Acid: THP
  SITE 12: note = misc_feature - Modified Amino Acid: 3Pya
  SITE 13: note = misc_feature - Modified Amino Acid: MeGly
  SITE 13: note = Mod_Res - N-terminal is: am
  REGION 1..6: note = Disulfid - Cyclic bond: Pen to Pen
XNTXKXXXXENXG

SEQ ID NO: 394 - protein, 13 aa, synthetic construct
  REGION 1..13: note = Modified peptide: 975
  SITE 1: note = Mod_Res - C-terminal is: ac
  SITE 1: note = misc_feature - Modified Amino Acid: Pen
  SITE 4: note = misc_feature - Modified Amino Acid: 7(3NAcPh)W
  SITE 5: note = misc_feature - Modified Amino Acid: KAc
  SITE 6: note = misc_feature - Modified Amino Acid: Pen
  SITE 7: note = misc_feature - Modified Amino Acid: AEF
  SITE 8: note = misc_feature - Modified Amino Acid: 2Nal
  SITE 9: note = misc_feature - Modified Amino Acid: THP
  SITE 12: note = misc_feature - Modified Amino Acid: 3Pya
  SITE 13: note = misc_feature - Modified Amino Acid: MeGly
  SITE 13: note = Mod_Res - N-terminal is: am
  REGION 1..6: note = Disulfid - Cyclic bond: Pen to Pen
XNTXKXXXXENXG

SEQ ID NO: 395 - protein, 13 aa, synthetic construct
  REGION 1..13: note = Modified peptide: 977
  SITE 1: note = Mod_Res - C-terminal is: ac
  SITE 1: note = misc_feature - Modified Amino Acid: Pen
  SITE 4: note = misc_feature - Modified Amino Acid: 7(4OCF3Ph)W
  SITE 5: note = misc_feature - Modified Amino Acid: KAc
  SITE 6: note = misc_feature - Modified Amino Acid: Pen
  SITE 7: note = misc_feature - Modified Amino Acid: AEF
  SITE 8: note = misc_feature - Modified Amino Acid: 2Nal
  SITE 9: note = misc_feature - Modified Amino Acid: THP
  SITE 12: note = misc_feature - Modified Amino Acid: 3Pya
  SITE 13: note = misc_feature - Modified Amino Acid: MeGly
  SITE 13: note = Mod_Res - N-terminal is: am
  REGION 1..6: note = Disulfid - Cyclic bond: Pen to Pen
XNTXKXXXXENXG

SEQ ID NO: 396 - protein, 13 aa, synthetic construct
  REGION 1..13: note = Modified peptide: 988
  SITE 1: note = Mod_Res - C-terminal is: ac
  SITE 1: note = misc_feature - Modified Amino Acid: Pen
  SITE 4: note = misc_feature - Modified Amino Acid: 7(4OMePh)W
  SITE 5: note = misc_feature - Modified Amino Acid: KAc
  SITE 6: note = misc_feature - Modified Amino Acid: Pen
  SITE 7: note = misc_feature - Modified Amino Acid: AEF
  SITE 8: note = misc_feature - Modified Amino Acid: 2Nal
  SITE 9: note = misc_feature - Modified Amino Acid: THP
  SITE 12: note = misc_feature - Modified Amino Acid: 3Pya
  SITE 13: note = misc_feature - Modified Amino Acid: MeGly
  SITE 13: note = Mod_Res - N-terminal is: am
  REGION 1..6: note = Disulfid - Cyclic bond: Pen to Pen
XNTXKXXXXENXG

SEQ ID NO: 397 - protein, 13 aa, synthetic construct
  REGION 1..13: note = Modified peptide: 989
  SITE 1: note = Mod_Res - C-terminal is: ac
  SITE 1: note = misc_feature - Modified Amino Acid: Pen
  SITE 4: note = misc_feature - Modified Amino Acid: 7MeW
  SITE 5: note = misc_feature - Modified Amino Acid: KAc
  SITE 6: note = misc_feature - Modified Amino Acid: Pen
  SITE 7: note = misc_feature - Modified Amino Acid: AEF
  SITE 8: note = misc_feature - Modified Amino Acid: 2Nal
  SITE 9: note = misc_feature - Modified Amino Acid: THP
  SITE 12: note = misc_feature - Modified Amino Acid: 3Pya
  SITE 13: note = misc_feature - Modified Amino Acid: MeGly
  SITE 13: note = Mod_Res - N-terminal is: am
  REGION 1..6: note = Disulfid - Cyclic bond: Pen to Pen
XNTWKXXXXKNXG

SEQ ID NO: 398 - protein, 13 aa, synthetic construct
  REGION 1..13: note = Modified peptide: 992
  SITE 1: note = Mod_Res - C-terminal is: DAGSuc
  SITE 1: note = misc_feature - Modified Amino Acid: Pen
  SITE 4: note = misc_feature - Modified Amino Acid: 7MeW
  SITE 5: note = misc_feature - Modified Amino Acid: KAc
  SITE 6: note = misc_feature - Modified Amino Acid: Pen
  SITE 7: note = misc_feature - Modified Amino Acid: AEF
  SITE 8: note = misc_feature - Modified Amino Acid: 2Nal
  SITE 9: note = misc_feature - Modified Amino Acid: THP
  SITE 12: note = misc_feature - Modified Amino Acid: 3Pya
  SITE 13: note = misc_feature - Modified Amino Acid: MeGly
  SITE 13: note = Mod_Res - N-terminal is: am
  REGION 1..6: note = Disulfid - Cyclic bond: Pen to Pen
XNTWKXXXXENXG

SEQ ID NO: 399 - protein, 14 aa, synthetic construct
  REGION 1..14: note = Modified peptide: 994dK(DAGSuc)
  SITE 1: note = Mod_Res - C-terminal is: ac
  SITE 1: note = misc_feature - Modified Amino Acid: dK
  SITE 2: note = misc_feature - Modified Amino Acid: Pen
  SITE 5: note = misc_feature - Modified Amino Acid: 7MeW
  SITE 6: note = misc_feature - Modified Amino Acid: KAc
  SITE 7: note = misc_feature - Modified Amino Acid: Pen
  SITE 8: note = misc_feature - Modified Amino Acid: AEF
  SITE 9: note = misc_feature - Modified Amino Acid: 2Nal
  SITE 10: note = misc_feature - Modified Amino Acid: THP
  SITE 13: note = misc_feature - Modified Amino Acid: 3Pya
  SITE 14: note = misc_feature - Modified Amino Acid: MeGly
  SITE 14: note = Mod_Res - N-terminal is: am
  REGION 2..7: note = Disulfid - Cyclic bond: Pen to Pen
KXNTWKXXXXENXG

SEQ ID NO: 400 - protein, 14 aa, synthetic construct
  REGION 1..14: note = Modified peptide: 995dK(DAGSuc)
  SITE 1: note = Mod_Res - C-terminal is: ac
  SITE 1: note = misc_feature - Modified Amino Acid: dK
  SITE 2: note = misc_feature - Modified Amino Acid: Pen
  SITE 5: note = misc_feature - Modified Amino Acid: 7MeW
  SITE 6: note = misc_feature - Modified Amino Acid: KAc
  SITE 7: note = misc_feature - Modified Amino Acid: Pen
  SITE 8: note = misc_feature - Modified Amino Acid: AEF
  SITE 9: note = misc_feature - Modified Amino Acid: 2Nal
  SITE 10: note = misc_feature - Modified Amino Acid: THP
  SITE 11: note = misc_feature - Modified Amino Acid: KAc
  SITE 13: note = misc_feature - Modified Amino Acid: 3Pya
  SITE 14: note = misc_feature - Modified Amino Acid: MeGly
  SITE 14: note = Mod_Res - N-terminal is: am
  REGION 2..7: note = Disulfid - Cyclic bond: Pen to Pen
KXNTWKXXXXKNXG

SEQ ID NO: 401 - protein, 13 aa, synthetic construct
  REGION 1..13: note = Modified peptide: 996
  SITE 1: note = Mod_Res - C-terminal is: ac
  SITE 1: note = misc_feature - Modified Amino Acid: Pen
  SITE 4: note = misc_feature - Modified Amino Acid: 7MeW
  SITE 5: note = misc_feature - Modified Amino Acid: KAc
  SITE 6: note = misc_feature - Modified Amino Acid: Pen
  SITE 7: note = misc_feature - Modified Amino Acid: AEF
  SITE 8: note = misc_feature - Modified Amino Acid: 2Nal
  SITE 9: note = misc_feature - Modified Amino Acid: THP
  SITE 12: note = misc_feature - Modified Amino Acid: 3Pya
  SITE 13: note = misc_feature - Modified Amino Acid: MeGly
  SITE 13: note = Mod_Res - N-terminal is: am
  REGION 1..6: note = Disulfid - Cyclic bond: Pen to Pen
XNTWKXXXXKNXG

SEQ ID NO: 402 - protein, 13 aa, synthetic construct
  REGION 1..13: note = Modified peptide: 1008
  SITE 1: note = Mod_Res - C-terminal is: DAGSuc
  SITE 1: note = misc_feature - Modified Amino Acid: Pen
  SITE 4: note = misc_feature - Modified Amino Acid: 7MeW
  SITE 5: note = misc_feature - Modified Amino Acid: KAc
  SITE 6: note = misc_feature - Modified Amino Acid: Pen
  SITE 7: note = misc_feature - Modified Amino Acid: AEF
  SITE 8: note = misc_feature - Modified Amino Acid: 2Nal
  SITE 9: note = misc_feature - Modified Amino Acid: THP
  SITE 10: note = misc_feature - Modified Amino Acid: KAc
  SITE 12: note = misc_feature - Modified Amino Acid: 3Pya
  SITE 13: note = misc_feature - Modified Amino Acid: MeGly
  SITE 13: note = Mod_Res - N-terminal is: am
  REGION 1..6: note = Disulfid - Cyclic bond: Pen to Pen
XNTWKXXXXKNXG

SEQ ID NO: 403 - protein, 13 aa, synthetic construct
  REGION 1..13: note = Modified peptide: 1072
  SITE 1: note = Mod_Res - C-terminal is: ac
  SITE 1: note = misc_feature - Modified Amino Acid: Pen
  SITE 4: note = misc_feature - Modified Amino Acid: 7(4Paz)W
  SITE 5: note = misc_feature - Modified Amino Acid: KAc
  SITE 6: note = misc_feature - Modified Amino Acid: Pen
  SITE 7: note = misc_feature - Modified Amino Acid: AEF
  SITE 8: note = misc_feature - Modified Amino Acid: 2Nal
  SITE 9: note = misc_feature - Modified Amino Acid: THP
  SITE 12: note = misc_feature - Modified Amino Acid: 3Pya
  SITE 13: note = misc_feature - Modified Amino Acid: MeGly
  SITE 13: note = Mod_Res - N-terminal is: am
  REGION 1..6: note = Disulfid - Cyclic bond: Pen to Pen
XNTXKXXXXENXG

SEQ ID NO: 404 - protein, 13 aa, synthetic construct
  REGION 1..13: note = Modified peptide: 1073
  SITE 1: note = Mod_Res - C-terminal is: ac
  SITE 1: note = misc_feature - Modified Amino Acid: Pen
  SITE 4: note = misc_feature - Modified Amino Acid: 7(7Imzpy)W
  SITE 5: note = misc_feature - Modified Amino Acid: KAc
  SITE 6: note = misc_feature - Modified Amino Acid: Pen
  SITE 7: note = misc_feature - Modified Amino Acid: AEF
  SITE 8: note = misc_feature - Modified Amino Acid: 2Nal
  SITE 9: note = misc_feature - Modified Amino Acid: THP
  SITE 12: note = misc_feature - Modified Amino Acid: 3Pya
  SITE 13: note = misc_feature - Modified Amino Acid: MeGly
  SITE 13: note = Mod_Res - N-terminal is: am
  REGION 1..6: note = Disulfid - Cyclic bond: Pen to Pen
XNTXKXXXXENXG

SEQ ID NO: 405 - protein, 13 aa, synthetic construct
  REGION 1..13: note = Modified peptide: 1104
  SITE 1: note = Mod_Res - C-terminal is: ac
  SITE 1: note = misc_feature - Modified Amino Acid: Pen
  SITE 4: note = misc_feature - Modified Amino Acid: 7(6(1)7dMeNDAZ))W
  SITE 5: note = misc_feature - Modified Amino Acid: KAc
  SITE 6: note = misc_feature - Modified Amino Acid: Pen
  SITE 7: note = misc_feature - Modified Amino Acid: AEF
  SITE 8: note = misc_feature - Modified Amino Acid: 2Nal
  SITE 9: note = misc_feature - Modified Amino Acid: THP
  SITE 12: note = misc_feature - Modified Amino Acid: 3Pya
  SITE 13: note = misc_feature - Modified Amino Acid: MeGly
  SITE 13: note = Mod_Res - N-terminal is: am
  REGION 1..6: note = Disulfid - Cyclic bond: Pen to Pen
XNTXKXXXXENXG

SEQ ID NO: 406 - protein, 13 aa, synthetic construct
  REGION 1..13: note = Modified peptide: 1105
  SITE 1: note = Mod_Res - C-terminal is: ac
  SITE 1: note = misc_feature - Modified Amino Acid: Pen
  SITE 4: note = misc_feature - Modified Amino Acid: 7(3UrPh)W
  SITE 5: note = misc_feature - Modified Amino Acid: KAc
  SITE 6: note = misc_feature - Modified Amino Acid: Pen
  SITE 7: note = misc_feature - Modified Amino Acid: AEF
  SITE 8: note = misc_feature - Modified Amino Acid: 2Nal
  SITE 9: note = misc_feature - Modified Amino Acid: THP
  SITE 12: note = misc_feature - Modified Amino Acid: 3Pya
  SITE 13: note = misc_feature - Modified Amino Acid: MeGly
  SITE 13: note = Mod_Res - N-terminal is: am
  REGION 1..6: note = Disulfid - Cyclic bond: Pen to Pen
XNTXKXXXXENXG

SEQ ID NO: 407 - protein, 13 aa, synthetic construct
  REGION 1..13: note = Modified peptide: 1106
  SITE 1: note = Mod_Res - C-terminal is: ac
  SITE 1: note = misc_feature - Modified Amino Acid: Pen
  SITE 4: note = misc_feature - Modified Amino Acid: 7(5(Ina7Pyr))W
  SITE 5: note = misc_feature - Modified Amino Acid: KAc
  SITE 6: note = misc_feature - Modified Amino Acid: Pen
  SITE 7: note = misc_feature - Modified Amino Acid: AEF
  SITE 8: note = misc_feature - Modified Amino Acid: 2Nal
  SITE 9: note = misc_feature - Modified Amino Acid: THP
  SITE 12: note = misc_feature - Modified Amino Acid: 3Pya
  SITE 13: note = misc_feature - Modified Amino Acid: MeGly
  SITE 13: note = Mod_Res - N-terminal is: am
  REGION 1..6: note = Disulfid - Cyclic bond: Pen to Pen
XNTXKXXXXENXG

SEQ ID NO: 408 - protein, 13 aa, synthetic construct
  REGION 1..13: note = Modified peptide: 1107
  SITE 1: note = Mod_Res - C-terminal is: ac
  SITE 1: note = misc_feature - Modified Amino Acid: Pen
  SITE 4: note = misc_feature - Modified Amino Acid: 7(4(CpCNPh))W
  SITE 5: note = misc_feature - Modified Amino Acid: KAc
  SITE 6: note = misc_feature - Modified Amino Acid: Pen
  SITE 7: note = misc_feature - Modified Amino Acid: AEF
  SITE 8: note = misc_feature - Modified Amino Acid: 2Nal
  SITE 9: note = misc_feature - Modified Amino Acid: THP
  SITE 12: note = misc_feature - Modified Amino Acid: 3Pya
  SITE 13: note = misc_feature - Modified Amino Acid: MeGly
  SITE 13: note = Mod_Res - N-terminal is: am
  REGION 1..6: note = Disulfid - Cyclic bond: Pen to Pen
XNTXKXXXXENXG

SEQ ID NO: 409 - protein, 13 aa, synthetic construct
  REGION 1..13: note = Modified peptide: 1131
  SITE 1: note = Mod_Res - C-terminal is: ac
  SITE 1: note = misc_feature - Modified Amino Acid: Pen
  SITE 4: note = misc_feature - Modified Amino Acid: 7MeW
  SITE 5: note = misc_feature - Modified Amino Acid: KAc
  SITE 6: note = misc_feature - Modified Amino Acid: Pen
  SITE 7: note = misc_feature - Modified Amino Acid: AEF
  SITE 8: note = misc_feature - Modified Amino Acid: 2Nal
  SITE 9: note = misc_feature - Modified Amino Acid: THP
  SITE 10: note = misc_feature - Modified Amino Acid: KAc
  SITE 12: note = misc_feature - Modified Amino Acid: 3Pya
  SITE 13: note = misc_feature - Modified Amino Acid: 4(R)HydroxyPro
  SITE 13: note = Mod_Res - N-terminal is: am
  REGION 1..6: note = Disulfid - Cyclic bond: Pen to Pen
XNTWKXXXXKNXX

SEQ ID NO: 410 - protein, 13 aa, synthetic construct
  REGION 1..13: note = Modified peptide: 1133
  SITE 1: note = Mod_Res - C-terminal is: ac
  SITE 1: note = misc_feature - Modified Amino Acid: Pen
  SITE 4: note = misc_feature - Modified Amino Acid: 7MeW
  SITE 5: note = misc_feature - Modified Amino Acid: KAc
  SITE 6: note = misc_feature - Modified Amino Acid: Pen
  SITE 7: note = misc_feature - Modified Amino Acid: AEF
  SITE 8: note = misc_feature - Modified Amino Acid: 2Nal
  SITE 9: note = misc_feature - Modified Amino Acid: THP
  SITE 10: note = misc_feature - Modified Amino Acid: KAc
  SITE 12: note = misc_feature - Modified Amino Acid: 3Pya
  SITE 13: note = misc_feature - Modified Amino Acid: 4(S)AminoPro
  SITE 13: note = Mod_Res - N-terminal is: am
  REGION 1..6: note = Disulfid - Cyclic bond: Pen to Pen
XNTWKXXXXKNXX

SEQ ID NO: 411 - protein, 13 aa, synthetic construct
  REGION 1..13: note = Modified peptide: 1134
  SITE 1: note = Mod_Res - C-terminal is: ac
  SITE 1: note = misc_feature - Modified Amino Acid: Pen
  SITE 4: note = misc_feature - Modified Amino Acid: 7MeW
  SITE 5: note = misc_feature - Modified Amino Acid: KAc
  SITE 6: note = misc_feature - Modified Amino Acid: Pen
  SITE 7: note = misc_feature - Modified Amino Acid: AEF
  SITE 8: note = misc_feature - Modified Amino Acid: 2Nal
  SITE 9: note = misc_feature - Modified Amino Acid: THP
  SITE 10: note = misc_feature - Modified Amino Acid: KAc
  SITE 12: note = misc_feature - Modified Amino Acid: 3Pya
  SITE 13: note = misc_feature - Modified Amino Acid: 5(R)diMePro
  SITE 13: note = Mod_Res - N-terminal is: am
  REGION 1..6: note = Disulfid - Cyclic bond: Pen to Pen
XNTWKXXXXKNXX

SEQ ID NO: 412 - protein, 13 aa, synthetic construct
  REGION 1..13: note = Modified peptide: 1143
  SITE 1: note = Mod_Res - C-terminal is: ac
  SITE 1: note = misc_feature - Modified Amino Acid: Pen
  SITE 4: note = misc_feature - Modified Amino Acid: 7(6(2MeNDAZ))W
  SITE 5: note = misc_feature - Modified Amino Acid: KAc
  SITE 6: note = misc_feature - Modified Amino Acid: Pen
  SITE 7: note = misc_feature - Modified Amino Acid: AEF
  SITE 8: note = misc_feature - Modified Amino Acid: 2Nal
  SITE 9: note = misc_feature - Modified Amino Acid: THP
  SITE 12: note = misc_feature - Modified Amino Acid: 3Pya
  SITE 13: note = misc_feature - Modified Amino Acid: MeGly
  SITE 13: note = Mod_Res - N-terminal is: am
  REGION 1..6: note = Disulfid - Cyclic bond: Pen to Pen
XNTXKXXXXENXG

SEQ ID NO: 413 - protein, 13 aa, synthetic construct
  REGION 1..13: note = Modified peptide: 1153
  SITE 1: note = Mod_Res - C-terminal is: ac
  SITE 1: note = misc_feature - Modified Amino Acid: Pen
  SITE 4: note = misc_feature - Modified Amino Acid: 7MeW
  SITE 5: note = misc_feature - Modified Amino Acid: AIB
  SITE 6: note = misc_feature - Modified Amino Acid: Pen
  SITE 7: note = misc_feature - Modified Amino Acid: AEF
  SITE 8: note = misc_feature - Modified Amino Acid: 2Nal
  SITE 9: note = misc_feature - Modified Amino Acid: THP
  SITE 10: note = misc_feature - Modified Amino Acid: AIB
  SITE 12: note = misc_feature - Modified Amino Acid: 3Pya
  SITE 13: note = misc_feature - Modified Amino Acid: MeGly
  SITE 13: note = Mod_Res - N-terminal is: am
  REGION 1..6: note = Disulfid - Cyclic bond: Pen to Pen
XNTWXXXXXXNXG

SEQ ID NO: 414 - protein, 13 aa, synthetic construct
  REGION 1..13: note = Modified peptide: 1185
  SITE 1: note = Mod_Res - C-terminal is: ac
  SITE 1: note = misc_feature - Modified Amino Acid: Pen
  SITE 4: note = misc_feature - Modified Amino Acid: 7MeW
  SITE 5: note = misc_feature - Modified Amino Acid: KAc
  SITE 6: note = misc_feature - Modified Amino Acid: Pen
  SITE 7: note = misc_feature - Modified Amino Acid: AEF
  SITE 8: note = misc_feature - Modified Amino Acid: 2Nal
  SITE 9: note = misc_feature - Modified Amino Acid: THP
  SITE 12: note = misc_feature - Modified Amino Acid: 3Pya
  SITE 13: note = misc_feature - Modified Amino Acid: MeGly
  SITE 13: note = Mod_Res - N-terminal is: am
  REGION 1..6: note = Disulfid - Cyclic bond: Pen to Pen
XNLWKXXXXENXG

SEQ ID NO: 415 - protein, 13 aa, synthetic construct
  REGION 1..13: note = Modified peptide: 1186
  SITE 1: note = Mod_Res - C-terminal is: ac
  SITE 1: note = misc_feature - Modified Amino Acid: Pen
  SITE 4: note = misc_feature - Modified Amino Acid: 7MeW
  SITE 5: note = misc_feature - Modified Amino Acid: KAc
  SITE 6: note = misc_feature - Modified Amino Acid: Pen
  SITE 7: note = misc_feature - Modified Amino Acid: AEF
  SITE 8: note = misc_feature - Modified Amino Acid: 2Nal
  SITE 9: note = misc_feature - Modified Amino Acid: THP
  SITE 12: note = misc_feature - Modified Amino Acid: 3Pya
  SITE 13: note = misc_feature - Modified Amino Acid: MeGly
  SITE 13: note = Mod_Res - N-terminal is: am
  REGION 1..6: note = Disulfid - Cyclic bond: Pen to Pen
XLTWKXXXXELXG

SEQ ID NO: 416 - protein, 13 aa, synthetic construct
  REGION 1..13: note = Modified peptide: 1187
  SITE 1: note = Mod_Res - C-terminal is: ac
  SITE 1: note = misc_feature - Modified Amino Acid: Aib
  SITE 4: note = misc_feature - Modified Amino Acid: 7MeW
  SITE 5: note = misc_feature - Modified Amino Acid: KAc
  SITE 6: note = misc_feature - Modified Amino Acid: Aib
  SITE 7: note = misc_feature - Modified Amino Acid: AEF
  SITE 8: note = misc_feature - Modified Amino Acid: 2Nal
  SITE 9: note = misc_feature - Modified Amino Acid: THP
  SITE 10: note = misc_feature - Modified Amino Acid: KAc
  SITE 12: note = misc_feature - Modified Amino Acid: 3Pya
  SITE 13: note = misc_feature - Modified Amino Acid: MeGly
  SITE 13: note = Mod_Res - N-terminal is: am
  REGION 2..5: note = Disulfid - Cyclic bond: E to Aib
XETWKXXXXKNXG

SEQ ID NO: 417 - protein, 13 aa, synthetic construct
  REGION 1..13: note = Modified peptide: 1188
  SITE 1: note = Mod_Res - C-terminal is: ac
  SITE 1: note = misc_feature - Modified Amino Acid: Pen
  SITE 4: note = misc_feature - Modified Amino Acid: 7MeW
  SITE 5: note = misc_feature - Modified Amino Acid: KAc
  SITE 6: note = misc_feature - Modified Amino Acid: Pen
  SITE 8: note = misc_feature - Modified Amino Acid: 2Nal
  SITE 9: note = misc_feature - Modified Amino Acid: THP
  SITE 10: note = misc_feature - Modified Amino Acid: KAc
  SITE 12: note = misc_feature - Modified Amino Acid: 3Pya
  SITE 13: note = misc_feature - Modified Amino Acid: MeGly
  SITE 13: note = Mod_Res - N-terminal is: am
  REGION 1..6: note = Disulfid - Cyclic bond: Pen to Pen
XNTWKXFXXKNXG

SEQ ID NO: 418 - protein, 13 aa, synthetic construct
  REGION 1..13: note = Modified peptide: 1189
  SITE 1: note = Mod_Res - C-terminal is: ac
  SITE 1: note = misc_feature - Modified Amino Acid: Pen
  SITE 4: note = misc_feature - Modified Amino Acid: 7MeW
  SITE 5: note = misc_feature - Modified Amino Acid: KAc
  SITE 6: note = misc_feature - Modified Amino Acid: Pen
  SITE 8: note = misc_feature - Modified Amino Acid: 2Nal
  SITE 9: note = misc_feature - Modified Amino Acid: THP
  SITE 10: note = misc_feature - Modified Amino Acid: KAc
  SITE 12: note = misc_feature - Modified Amino Acid: 3Pya
  SITE 13: note = misc_feature - Modified Amino Acid: MeGly
  SITE 13: note = Mod_Res - N-terminal is: am
  REGION 1..6: note = Disulfid - Cyclic bond: Pen to Pen
XNTWKXYXXKNXG

SEQ ID NO: 419 - protein, 13 aa, synthetic construct
  REGION 1..13: note = Modified peptide: 1190
  SITE 1: note = Mod_Res - C-terminal is: ac
  SITE 1: note = misc_feature - Modified Amino Acid: Pen
  SITE 4: note = misc_feature - Modified Amino Acid: 7MeW
  SITE 5: note = misc_feature - Modified Amino Acid: KAc
  SITE 6: note = misc_feature - Modified Amino Acid: Pen
  SITE 7: note = misc_feature - Modified Amino Acid: 4OMeF
  SITE 8: note = misc_feature - Modified Amino Acid: 2Nal
  SITE 9: note = misc_feature - Modified Amino Acid: THP
  SITE 10: note = misc_feature - Modified Amino Acid: KAc
  SITE 12: note = misc_feature - Modified Amino Acid: 3Pya
  SITE 13: note = misc_feature - Modified Amino Acid: MeGly
  SITE 13: note = Mod_Res - N-terminal is: am
  REGION 1..6: note = Disulfid - Cyclic bond: Pen to Pen
XNTWKXXXXKNXG

SEQ ID NO: 420 - protein, 13 aa, synthetic construct
  REGION 1..13: note = Modified peptide: 1191
  SITE 1: note = Mod_Res - C-terminal is: ac
  SITE 1: note = misc_feature - Modified Amino Acid: Pen
  SITE 4: note = misc_feature - Modified Amino Acid: 7MeW
  SITE 5: note = misc_feature - Modified Amino Acid: KAc
  SITE 6: note = misc_feature - Modified Amino Acid: Pen
  SITE 7: note = misc_feature - Modified Amino Acid: 4AmF
  SITE 8: note = misc_feature - Modified Amino Acid: 2Nal
  SITE 9: note = misc_feature - Modified Amino Acid: THP
  SITE 12: note = misc_feature - Modified Amino Acid: 3Pya
  SITE 13: note = misc_feature - Modified Amino Acid: dK
  SITE 13: note = Mod_Res - N-terminal is: am
  REGION 1..6: note = Disulfid - Cyclic bond: Pen to Pen
XNTWKXXXXENXK

SEQ ID NO: 421 - protein, 13 aa, synthetic construct
  REGION 1..13: note = Modified peptide: 1192
  SITE 1: note = Mod_Res - C-terminal is: ac
  SITE 1: note = misc_feature - Modified Amino Acid: Pen
  SITE 4: note = misc_feature - Modified Amino Acid: 7MeW
  SITE 5: note = misc_feature - Modified Amino Acid: KAc
  SITE 6: note = misc_feature - Modified Amino Acid: Pen
  SITE 7: note = misc_feature - Modified Amino Acid: 4AmF
  SITE 8: note = misc_feature - Modified Amino Acid: 2Nal
  SITE 9: note = misc_feature - Modified Amino Acid: THP
  SITE 10: note = misc_feature - Modified Amino Acid: KAc
  SITE 12: note = misc_feature - Modified Amino Acid: 3Pya
  SITE 13: note = misc_feature - Modified Amino Acid: MeGly
  SITE 13: note = Mod_Res - N-terminal is: am
  REGION 1..6: note = Disulfid - Cyclic bond: Pen to Pen
XNTWKXXXXKNXG

SEQ ID NO: 422 - protein, 13 aa, synthetic construct
  REGION 1..13: note = Modified peptide: 1193
  SITE 1: note = Mod_Res - C-terminal is: ac
  SITE 1: note = misc_feature - Modified Amino Acid: Pen
  SITE 4: note = misc_feature - Modified Amino Acid: 7MeW
  SITE 5: note = misc_feature - Modified Amino Acid: KAc
  SITE 6: note = misc_feature - Modified Amino Acid: Pen
  SITE 7: note = misc_feature - Modified Amino Acid: AEF
  SITE 8: note = misc_feature - Modified Amino Acid: 2Nal
  SITE 9: note = misc_feature - Modified Amino Acid: THP
  SITE 12: note = misc_feature - Modified Amino Acid: 3Pya
  SITE 13: note = misc_feature - Modified Amino Acid: MeGly
  SITE 13: note = Mod_Res - N-terminal is: am
  REGION 1..6: note = Disulfid - Cyclic bond: Pen to Pen
XNTWKXXXXLLXG

SEQ ID NO: 423 - protein, 13 aa, synthetic construct
  REGION 1..13: note = Modified peptide: 1194
  SITE 1: note = Mod_Res - C-terminal is: ac
  SITE 1: note = misc_feature - Modified Amino Acid: Pen
  SITE 4: note = misc_feature - Modified Amino Acid: 7MeW
  SITE 5: note = misc_feature - Modified Amino Acid: KAc
  SITE 6: note = misc_feature - Modified Amino Acid: Pen
  SITE 7: note = misc_feature - Modified Amino Acid: 4OMeF
  SITE 8: note = misc_feature - Modified Amino Acid: 2Nal
  SITE 9: note = misc_feature - Modified Amino Acid: aMeL
  SITE 12: note = misc_feature - Modified Amino Acid: 3Pya
  SITE 13: note = misc_feature - Modified Amino Acid: MeGly
  SITE 13: note = Mod_Res - N-terminal is: am
  REGION 1..6: note = Disulfid - Cyclic bond: Pen to Pen
XNTWKXXXLLNXG

SEQ ID NO: 424 - protein, 13 aa, synthetic construct
  REGION 1..13: note = Modified peptide: 1195
  SITE 1: note = Mod_Res - C-terminal is: ac
  SITE 1: note = misc_feature - Modified Amino Acid: Pen
  SITE 4: note = misc_feature - Modified Amino Acid: 7MeW
  SITE 5: note = misc_feature - Modified Amino Acid: KAc
  SITE 6: note = misc_feature - Modified Amino Acid: Pen
  SITE 7: note = misc_feature - Modified Amino Acid: AEF
  SITE 8: note = misc_feature - Modified Amino Acid: 2Nal
  SITE 9: note = misc_feature - Modified Amino Acid: THP
  SITE 12: note = misc_feature - Modified Amino Acid: 3Pya
  SITE 13: note = misc_feature - Modified Amino Acid: MeGly
  SITE 13: note = Mod_Res - N-terminal is: am
  REGION 1..6: note = Disulfid - Cyclic bond: Pen to Pen
XLTWKXXXXLLXG

SEQ ID NO: 425 - protein, 12 aa, synthetic construct
  REGION 1..12: note = Modified peptide: 1196
  SITE 1: note = Mod_Res - C-terminal is: 2Benzyl(3)
  SITE 3: note = misc_feature - Modified Amino Acid: 7MeW
  SITE 4: note = misc_feature - Modified Amino Acid: KAc
  SITE 5: note = misc_feature - Modified Amino Acid: Pen
  SITE 6: note = misc_feature - Modified Amino Acid: AEF
  SITE 7: note = misc_feature - Modified Amino Acid: 2Nal
  SITE 8: note = misc_feature - Modified Amino Acid: THP
  SITE 11: note = misc_feature - Modified Amino Acid: 3Pya
  SITE 12: note = misc_feature - Modified Amino Acid: MeGly
  SITE 12: note = Mod_Res - N-terminal is: am
  REGION 1..5: note = Disulfid - Cyclic bond: R1 to Pen
NTWKXXXXENXG

SEQ ID NO: 426 - protein, 12 aa, synthetic construct
  REGION 1..12: note = Modified peptide: 1197
  SITE 1: note = Mod_Res - C-terminal is: 2Benzyl(3)
  SITE 3: note = misc_feature - Modified Amino Acid: 7MeW
  SITE 4: note = misc_feature - Modified Amino Acid: KAc
  SITE 5: note = misc_feature - Modified Amino Acid: Pen
  SITE 6: note = misc_feature - Modified Amino Acid: 4OMeF
  SITE 7: note = misc_feature - Modified Amino Acid: 2Nal
  SITE 8: note = misc_feature - Modified Amino Acid: THP
  SITE 11: note = misc_feature - Modified Amino Acid: 3Pya
  SITE 12: note = misc_feature - Modified Amino Acid: MeGly
  SITE 12: note = Mod_Res - N-terminal is: am
  REGION 1..5: note = Disulfid - Cyclic bond: R1 to Pen
NTWKXFXXANXG

SEQ ID NO: 427 - protein, 13 aa, synthetic construct
  REGION 1..13: note = Modified peptide: 1281
  SITE 1: note = Mod_Res - C-terminal is: ac
  SITE 1: note = misc_feature - Modified Amino Acid: Pen
  SITE 4: note = misc_feature - Modified Amino Acid: BT
  SITE 5: note = misc_feature - Modified Amino Acid: KAc
  SITE 6: note = misc_feature - Modified Amino Acid: Pen
  SITE 7: note = misc_feature - Modified Amino Acid: AEF
  SITE 8: note = misc_feature - Modified Amino Acid: 2Nal
  SITE 9: note = misc_feature - Modified Amino Acid: THP
  SITE 12: note = misc_feature - Modified Amino Acid: 3Pya
  SITE 13: note = misc_feature - Modified Amino Acid: MeGly
  SITE 13: note = Mod_Res - N-terminal is: am
  REGION 1..6: note = Disulfid - Cyclic bond: Pen to Pen
XNTXKXXXXENXG

SEQ ID NO: 428 - protein, 13 aa, synthetic construct
  REGION 1..13: note = Modified peptide: 1303
  SITE 1: note = Mod_Res - C-terminal is: ac
  SITE 1: note = misc_feature - Modified Amino Acid: Pen
  SITE 4: note = misc_feature - Modified Amino Acid: 7MeW
  SITE 5: note = misc_feature - Modified Amino Acid: KMorph
  SITE 6: note = misc_feature - Modified Amino Acid: Pen
  SITE 8: note = misc_feature - Modified Amino Acid: 2Nal
  SITE 9: note = misc_feature - Modified Amino Acid: aMeL
  SITE 12: note = misc_feature - Modified Amino Acid: 3Pya
  SITE 13: note = misc_feature - Modified Amino Acid: MeGly
  SITE 13: note = Mod_Res - N-terminal is: am
  REGION 1..6: note = Disulfid - Cyclic bond: Pen to Pen
XLTWXXFXLLNXG

SEQ ID NO: 429 - protein, 13 aa, synthetic construct
  REGION 1..13: note = Modified peptide: 1305
  SITE 1: note = Mod_Res - C-terminal is: MorphCO
  SITE 1: note = misc_feature - Modified Amino Acid: Pen
  SITE 4: note = misc_feature - Modified Amino Acid: 7MeW
  SITE 5: note = misc_feature - Modified Amino Acid: KAc
  SITE 6: note = misc_feature - Modified Amino Acid: Pen
  SITE 8: note = misc_feature - Modified Amino Acid: 2Nal
  SITE 9: note = misc_feature - Modified Amino Acid: aMeL
  SITE 12: note = misc_feature - Modified Amino Acid: 3Pya
  SITE 13: note = misc_feature - Modified Amino Acid: MeGly
  SITE 13: note = Mod_Res - N-terminal is: am
  REGION 1..6: note = Disulfid - Cyclic bond: Pen to Pen
XLTWKXFXLLNXG

SEQ ID NO: 430 - protein, 13 aa, synthetic construct
  REGION 1..13: note = Modified peptide: 1307
  SITE 1: note = Mod_Res - C-terminal is: ac
  SITE 1: note = misc_feature - Modified Amino Acid: Pen
  SITE 4: note = misc_feature - Modified Amino Acid: 7MeW
  SITE 5: note = misc_feature - Modified Amino Acid: KMorph
  SITE 6: note = misc_feature - Modified Amino Acid: Pen
  SITE 8: note = misc_feature - Modified Amino Acid: 2Nal
  SITE 9: note = misc_feature - Modified Amino Acid: aMeL
  SITE 12: note = misc_feature - Modified Amino Acid: 3Pya
  SITE 13: note = misc_feature - Modified Amino Acid: MeGly
  SITE 13: note = Mod_Res - N-terminal is: am
  REGION 1..6: note = Disulfid - Cyclic bond: Pen to Pen
XNTWXXFXLLNXG

SEQ ID NO: 431 - protein, 14 aa, synthetic construct
  REGION 1..14: note = Modified peptide: 1309K(Morph)
  SITE 1: note = Mod_Res - C-terminal is: ac
  SITE 1: note = misc_feature - Modified Amino Acid: Kmorp
  SITE 2: note = misc_feature - Modified Amino Acid: Pen
  SITE 5: note = misc_feature - Modified Amino Acid: 7MeW
  SITE 6: note = misc_feature - Modified Amino Acid: KAc
  SITE 7: note = misc_feature - Modified Amino Acid: Pen
  SITE 9: note = misc_feature - Modified Amino Acid: 2Nal
  SITE 10: note = misc_feature - Modified Amino Acid: aMeL
  SITE 13: note = misc_feature - Modified Amino Acid: 3Pya
  SITE 14: note = misc_feature - Modified Amino Acid: MeGly
  SITE 14: note = Mod_Res - N-terminal is: am
  REGION 2..7: note = Disulfid - Cyclic bond: Pen to Pen
XXLTWKXFXLLNXG

SEQ ID NO: 432 - protein, 14 aa, synthetic construct
  REGION 1..14: note = Modified peptide: 1311K(Morph)
  SITE 1: note = Mod_Res - C-terminal is: ac
  SITE 1: note = misc_feature - Modified Amino Acid: Kmorp
  SITE 2: note = misc_feature - Modified Amino Acid: Pen
  SITE 5: note = misc_feature - Modified Amino Acid: 7MeW
  SITE 6: note = misc_feature - Modified Amino Acid: KAc
  SITE 7: note = misc_feature - Modified Amino Acid: Pen
  SITE 9: note = misc_feature - Modified Amino Acid: 2Nal
  SITE 10: note = misc_feature - Modified Amino Acid: aMeL
  SITE 13: note = misc_feature - Modified Amino Acid: 3Pya
  SITE 14: note = misc_feature - Modified Amino Acid: MeGly
  SITE 14: note = Mod_Res - N-terminal is: am
  REGION 2..7: note = Disulfid - Cyclic bond: Pen to Pen
XXNTWKXFXLLNXG

SEQ ID NO: 433 - protein, 13 aa, synthetic construct
  REGION 1..13: note = Modified peptide: 1313
  SITE 1: note = Mod_Res - C-terminal is: ac
  SITE 1: note = misc_feature - Modified Amino Acid: Pen
  SITE 4: note = misc_feature - Modified Amino Acid: 7MeW
  SITE 6: note = misc_feature - Modified Amino Acid: Pen
  SITE 8: note = misc_feature - Modified Amino Acid: 2Nal
  SITE 9: note = misc_feature - Modified Amino Acid: aMeL
  SITE 12: note = misc_feature - Modified Amino Acid: 3Pya
  SITE 13: note = misc_feature - Modified Amino Acid: MeGly
  SITE 13: note = Mod_Res - N-terminal is: am
  REGION 1..6: note = Disulfid - Cyclic bond: Pen to Pen
XLTWKXFXLLNXG

SEQ ID NO: 434 - protein, 13 aa, synthetic construct
  REGION 1..13: note = Modified peptide: 1314
  SITE 1: note = Mod_Res - C-terminal is: ac
  SITE 1: note = misc_feature - Modified Amino Acid: Pen
  SITE 4: note = misc_feature - Modified Amino Acid: 7MeW
  SITE 6: note = misc_feature - Modified Amino Acid: Pen
  SITE 8: note = misc_feature - Modified Amino Acid: 2Nal
  SITE 9: note = misc_feature - Modified Amino Acid: aMeL
  SITE 12: note = misc_feature - Modified Amino Acid: 3Pya
  SITE 13: note = misc_feature - Modified Amino Acid: MeGly
  SITE 13: note = Mod_Res - N-terminal is: am
  REGION 1..6: note = Disulfid - Cyclic bond: Pen to Pen
XNTWKXFXLLNXG

SEQ ID NO: 435 - protein, 14 aa, synthetic construct
  REGION 1..14: note = Modified peptide: 1342K(Morph)
  SITE 1: note = Mod_Res - C-terminal is: ac
  SITE 1: note = misc_feature - Modified Amino Acid: Kmorp
  SITE 2: note = misc_feature - Modified Amino Acid: Pen
  SITE 5: note = misc_feature - Modified Amino Acid: 7MeW
  SITE 6: note = misc_feature - Modified Amino Acid: KAc
  SITE 7: note = misc_feature - Modified Amino Acid: Pen
  SITE 8: note = misc_feature - Modified Amino Acid: 4OMeF
  SITE 9: note = misc_feature - Modified Amino Acid: 2Nal
  SITE 10: note = misc_feature - Modified Amino Acid: aMeL
  SITE 13: note = misc_feature - Modified Amino Acid: 3Pya
  SITE 14: note = misc_feature - Modified Amino Acid: MeGly
  SITE 14: note = Mod_Res - N-terminal is: am
  REGION 2..7: note = Disulfid - Cyclic bond: Pen to Pen
XXNTWKXXXLLNXG

SEQ ID NO: 436 - protein, 14 aa, synthetic construct
  REGION 1..14: note = Modified peptide: 1343K(Morph)
  SITE 1: note = Mod_Res - C-terminal is: ac
  SITE 1: note = misc_feature - Modified Amino Acid: Kmorp
  SITE 2: note = misc_feature - Modified Amino Acid: Pen
  SITE 5: note = misc_feature - Modified Amino Acid: 7MeW
  SITE 6: note = misc_feature - Modified Amino Acid: KAc
  SITE 7: note = misc_feature - Modified Amino Acid: Pen
  SITE 8: note = misc_feature - Modified Amino Acid: 4OMeF
  SITE 9: note = misc_feature - Modified Amino Acid: 2Nal
  SITE 10: note = misc_feature - Modified Amino Acid: aMeL
  SITE 13: note = misc_feature - Modified Amino Acid: 3Pya
  SITE 14: note = misc_feature - Modified Amino Acid: MeGly
  SITE 14: note = Mod_Res - N-terminal is: am
  REGION 2..7: note = Disulfid - Cyclic bond: Pen to Pen
XXLTWKXXXLLNXG

SEQ ID NO: 437 - protein, 13 aa, synthetic construct
  REGION 1..13: note = Modified peptide: 1344
  SITE 1: note = Mod_Res - C-terminal is: MorphCO
  SITE 1: note = misc_feature - Modified Amino Acid: Pen
  SITE 4: note = misc_feature - Modified Amino Acid: 7MeW
  SITE 5: note = misc_feature - Modified Amino Acid: KAc
  SITE 6: note = misc_feature - Modified Amino Acid: Pen
  SITE 7: note = misc_feature - Modified Amino Acid: 4OMeF
  SITE 8: note = misc_feature - Modified Amino Acid: 2Nal
  SITE 9: note = misc_feature - Modified Amino Acid: aMeL
  SITE 12: note = misc_feature - Modified Amino Acid: 3Pya
  SITE 13: note = misc_feature - Modified Amino Acid: MeGly
  SITE 13: note = Mod_Res - N-terminal is: am
  REGION 1..6: note = Disulfid - Cyclic bond: Pen to Pen
XLTWKXXXLLNXG

SEQ ID NO: 438 - protein, 13 aa, synthetic construct
  REGION 1..13: note = Modified peptide: 1345
  SITE 1: note = Mod_Res - C-terminal is: ac
  SITE 1: note = misc_feature - Modified Amino Acid: Pen
  SITE 4: note = misc_feature - Modified Amino Acid: 7MeW
  SITE 5: note = misc_feature - Modified Amino Acid: KMorph
  SITE 6: note = misc_feature - Modified Amino Acid: Pen
  SITE 7: note = misc_feature - Modified Amino Acid: 4OMeF
  SITE 8: note = misc_feature - Modified Amino Acid: 2Nal
  SITE 9: note = misc_feature - Modified Amino Acid: aMeL
  SITE 12: note = misc_feature - Modified Amino Acid: 3Pya
  SITE 13: note = misc_feature - Modified Amino Acid: MeGly
  SITE 13: note = Mod_Res - N-terminal is: am
  REGION 1..6: note = Disulfid - Cyclic bond: Pen to Pen
XLTWXXXXLLNXG

SEQ ID NO: 439 - protein, 14 aa, synthetic construct
  REGION 1..14: note = Modified peptide: 1351K(mPEG12)
  SITE 1: note = Mod_Res - C-terminal is: ac
  SITE 1: note = misc_feature - Modified Amino Acid: Kmorp
  SITE 2: note = misc_feature - Modified Amino Acid: Pen
  SITE 5: note = misc_feature - Modified Amino Acid: 7MeW
  SITE 6: note = misc_feature - Modified Amino Acid: KAc
  SITE 7: note = misc_feature - Modified Amino Acid: Pen
  SITE 8: note = misc_feature - Modified Amino Acid: 4OMeF
  SITE 9: note = misc_feature - Modified Amino Acid: 2Nal
  SITE 10: note = misc_feature - Modified Amino Acid: aMeL
  SITE 13: note = misc_feature - Modified Amino Acid: 3Pya
  SITE 14: note = misc_feature - Modified Amino Acid: MeGly
  SITE 14: note = Mod_Res - N-terminal is: am
  REGION 2..7: note = Disulfid - Cyclic bond: Pen to Pen
XXNTWKXXXLLNXG

SEQ ID NO: 440 - protein, 14 aa, synthetic construct
  REGION 1..14: note = Modified peptide: 1352K(mPEG12)
  SITE 1: note = Mod_Res - C-terminal is: ac
  SITE 1: note = misc_feature - Modified Amino Acid: Kmorp
  SITE 2: note = misc_feature - Modified Amino Acid: Pen
  SITE 5: note = misc_feature - Modified Amino Acid: 7MeW
  SITE 6: note = misc_feature - Modified Amino Acid: KAc
  SITE 7: note = misc_feature - Modified Amino Acid: Pen
  SITE 8: note = misc_feature - Modified Amino Acid: 4OMeF
  SITE 9: note = misc_feature - Modified Amino Acid: 2Nal
  SITE 10: note = misc_feature - Modified Amino Acid: aMeL
  SITE 13: note = misc_feature - Modified Amino Acid: 3Pya
  SITE 14: note = misc_feature - Modified Amino Acid: MeGly
  SITE 14: note = Mod_Res - N-terminal is: am
  REGION 2..7: note = Disulfid - Cyclic bond: Pen to Pen
XXLTWKXXXLLNXG

SEQ ID NO: 441 - protein, 13 aa, synthetic construct
  REGION 1..13: note = Modified peptide: 1353
  SITE 1: note = Mod_Res - C-terminal is: ac
  SITE 1: note = misc_feature - Modified Amino Acid: Pen
  SITE 4: note = misc_feature - Modified Amino Acid: 7MeW
  SITE 6: note = misc_feature - Modified Amino Acid: Pen
  SITE 7: note = misc_feature - Modified Amino Acid: 4OMeF
  SITE 8: note = misc_feature - Modified Amino Acid: 2Nal
  SITE 9: note = misc_feature - Modified Amino Acid: aMeL
  SITE 12: note = misc_feature - Modified Amino Acid: 3Pya
  SITE 13: note = misc_feature - Modified Amino Acid: MeGly
  SITE 13: note = Mod_Res - N-terminal is: am
  REGION 1..6: note = Disulfid - Cyclic bond: Pen to Pen
XNTWKXXXLLNXG

SEQ ID NO: 442 - protein, 13 aa, synthetic construct
  REGION 1..13: note = Modified peptide: 1354
  SITE 1: note = Mod_Res - C-terminal is: ac
  SITE 1: note = misc_feature - Modified Amino Acid: Pen
  SITE 4: note = misc_feature - Modified Amino Acid: 7MeW
  SITE 6: note = misc_feature - Modified Amino Acid: Pen
  SITE 7: note = misc_feature - Modified Amino Acid: 4OMeF
  SITE 8: note = misc_feature - Modified Amino Acid: 2Nal
  SITE 9: note = misc_feature - Modified Amino Acid: aMeL
  SITE 12: note = misc_feature - Modified Amino Acid: 3Pya
  SITE 13: note = misc_feature - Modified Amino Acid: MeGly
  SITE 13: note = Mod_Res - N-terminal is: am
  REGION 1..6: note = Disulfid - Cyclic bond: Pen to Pen
XLTWKXXXLLNXG

SEQ ID NO: 443 - protein, 13 aa, synthetic construct
  REGION 1..13: note = Modified peptide: 1402
  SITE 1: note = Mod_Res - C-terminal is: ac
  SITE 1: note = misc_feature - Modified Amino Acid: Pen
  SITE 4: note = misc_feature - Modified Amino Acid: 7MeW
  SITE 5: note = misc_feature - Modified Amino Acid: KAc
  SITE 6: note = misc_feature - Modified Amino Acid: Pen
  SITE 7: note = misc_feature - Modified Amino Acid: D(Pip)
  SITE 8: note = misc_feature - Modified Amino Acid: 2Nal
  SITE 9: note = misc_feature - Modified Amino Acid: THP
  SITE 10: note = misc_feature - Modified Amino Acid: KAc
  SITE 12: note = misc_feature - Modified Amino Acid: 3Pya
  SITE 13: note = misc_feature - Modified Amino Acid: MeGly
  SITE 13: note = Mod_Res - N-terminal is: am
  REGION 1..6: note = Disulfid - Cyclic bond: Pen to Pen
XNTWKXXXXKNXG

SEQ ID NO: 444 - protein, 13 aa, synthetic construct
  REGION 1..13: note = Modified peptide: 1427
  SITE 1: note = Mod_Res - C-terminal is: ac
  SITE 1: note = misc_feature - Modified Amino Acid: Pen
  SITE 4: note = misc_feature - Modified Amino Acid: 7MeW
  SITE 5: note = misc_feature - Modified Amino Acid: KAc
  SITE 6: note = misc_feature - Modified Amino Acid: Pen
  SITE 7: note = misc_feature - Modified Amino Acid: Tzl(mPEG3)
  SITE 8: note = misc_feature - Modified Amino Acid: 2Nal
  SITE 9: note = misc_feature - Modified Amino Acid: THP
  SITE 10: note = misc_feature - Modified Amino Acid: KAc
  SITE 12: note = misc_feature - Modified Amino Acid: 3Pya
  SITE 13: note = misc_feature - Modified Amino Acid: MeGly
  SITE 13: note = Mod_Res - N-terminal is: am
  REGION 1..6: note = Disulfid - Cyclic bond: Pen to Pen
XNTWKXXXXKNXG

SEQ ID NO: 445 - protein, 13 aa, synthetic construct
  REGION 1..13: note = Modified peptide: 1428
  SITE 1: note = Mod_Res - C-terminal is: ac
  SITE 1: note = misc_feature - Modified Amino Acid: Pen
  SITE 4: note = misc_feature - Modified Amino Acid: 7MeW
  SITE 5: note = misc_feature - Modified Amino Acid: KAc
  SITE 6: note = misc_feature - Modified Amino Acid: Pen
  SITE 7: note = misc_feature - Modified Amino Acid: 3FTyr
  SITE 8: note = misc_feature - Modified Amino Acid: 2Nal
  SITE 9: note = misc_feature - Modified Amino Acid: THP
  SITE 10: note = misc_feature - Modified Amino Acid: KAc
  SITE 12: note = misc_feature - Modified Amino Acid: 3Pya
  SITE 13: note = misc_feature - Modified Amino Acid: MeGly
  SITE 13: note = Mod_Res - N-terminal is: am
  REGION 1..6: note = Disulfid - Cyclic bond: Pen to Pen
XNTWKXXXXKNXG

SEQ ID NO: 446 - protein, 13 aa, synthetic construct
  REGION 1..13: note = Modified peptide: 1429
  SITE 1: note = Mod_Res - C-terminal is: ac
  SITE 1: note = misc_feature - Modified Amino Acid: Pen
  SITE 4: note = misc_feature - Modified Amino Acid: 7MeW
  SITE 5: note = misc_feature - Modified Amino Acid: KAc
  SITE 6: note = misc_feature - Modified Amino Acid: Pen
  SITE 7: note = misc_feature - Modified Amino Acid: Y(OTzl)
  SITE 8: note = misc_feature - Modified Amino Acid: 2Nal
  SITE 9: note = misc_feature - Modified Amino Acid: THP
  SITE 10: note = misc_feature - Modified Amino Acid: KAc
  SITE 12: note = misc_feature - Modified Amino Acid: 3Pya
  SITE 13: note = misc_feature - Modified Amino Acid: MeGly
  SITE 13: note = Mod_Res - N-terminal is: am
  REGION 1..6: note = Disulfid - Cyclic bond: Pen to Pen
XNTWKXXXXKNXG

SEQ ID NO: 447 - protein, 13 aa, synthetic construct
  REGION 1..13: note = Modified peptide: 1430
  SITE 1: note = Mod_Res - C-terminal is: ac
  SITE 1: note = misc_feature - Modified Amino Acid: Pen
  SITE 4: note = misc_feature - Modified Amino Acid: 7MeW
  SITE 5: note = misc_feature - Modified Amino Acid: KAc
  SITE 6: note = misc_feature - Modified Amino Acid: Pen
  SITE 7: note = misc_feature - Modified Amino Acid: Y(OTzl(mPEG3))
  SITE 8: note = misc_feature - Modified Amino Acid: 2Nal
  SITE 9: note = misc_feature - Modified Amino Acid: THP
  SITE 10: note = misc_feature - Modified Amino Acid: KAc
  SITE 12: note = misc_feature - Modified Amino Acid: 3Pya
  SITE 13: note = misc_feature - Modified Amino Acid: MeGly
  SITE 13: note = Mod_Res - N-terminal is: am
  REGION 1..6: note = Disulfid - Cyclic bond: Pen to Pen
XNTWKXXXXKNXG

SEQ ID NO: 448 - protein, 13 aa, synthetic construct
  REGION 1..13: note = Modified peptide: 1431
  SITE 1: note = Mod_Res - C-terminal is: ac
  SITE 1: note = misc_feature - Modified Amino Acid: Pen
  SITE 4: note = misc_feature - Modified Amino Acid: 7MeW
  SITE 5: note = misc_feature - Modified Amino Acid: KAc
  SITE 6: note = misc_feature - Modified Amino Acid: Pen
  SITE 7: note = misc_feature - Modified Amino Acid: Tzl
  SITE 8: note = misc_feature - Modified Amino Acid: 2Nal
  SITE 9: note = misc_feature - Modified Amino Acid: THP
  SITE 10: note = misc_feature - Modified Amino Acid: KAc
  SITE 12: note = misc_feature - Modified Amino Acid: 3Pya
  SITE 13: note = misc_feature - Modified Amino Acid: MeGly
  SITE 13: note = Mod_Res - N-terminal is: am
  REGION 1..6: note = Disulfid - Cyclic bond: Pen to Pen
XNTWKXXXXKNXG

SEQ ID NO: 449 - protein, 13 aa, synthetic construct
  REGION 1..13: note = Modified peptide: 1436
  SITE 1: note = Mod_Res - C-terminal is: ac
  SITE 1: note = misc_feature - Modified Amino Acid: Pen
  SITE 4: note = misc_feature - Modified Amino Acid: 7MeW
  SITE 5: note = misc_feature - Modified Amino Acid: KAc
  SITE 6: note = misc_feature - Modified Amino Acid: Pen
  SITE 7: note = misc_feature - Modified Amino Acid: Tzl(PEG3OH)
  SITE 8: note = misc_feature - Modified Amino Acid: 2Nal
  SITE 9: note = misc_feature - Modified Amino Acid: THP
  SITE 10: note = misc_feature - Modified Amino Acid: KAc
  SITE 12: note = misc_feature - Modified Amino Acid: 3Pya
  SITE 13: note = misc_feature - Modified Amino Acid: MeGly
  SITE 13: note = Mod_Res - N-terminal is: am
  REGION 1..6: note = Disulfid - Cyclic bond: Pen to Pen
XNTWKXXXXKNXG

SEQ ID NO: 450 - protein, 13 aa, synthetic construct
  REGION 1..13: note = Modified peptide: 1749
  SITE 1: note = Mod_Res - C-terminal is: ac
  SITE 1: note = misc_feature - Modified Amino Acid: Abu
  SITE 7: note = misc_feature - Modified Amino Acid: AEF
  SITE 8: note = misc_feature - Modified Amino Acid: 2Nal
  SITE 9: note = misc_feature - Modified Amino Acid: THP
  SITE 12: note = misc_feature - Modified Amino Acid: 3Pya
  SITE 13: note = misc_feature - Modified Amino Acid: MeGly
  SITE 13: note = Mod_Res - N-terminal is: am
  REGION 1..6: note = Disulfid - Cyclic bond: Abu to C
XNTWQCXXXENXG

SEQ ID NO: 451 - protein, 13 aa, synthetic construct
  REGION 1..13: note = Modified peptide: 1755
  SITE 1: note = Mod_Res - C-terminal is: 5Ava
  SITE 1: note = misc_feature - Modified Amino Acid: Ala
  SITE 6: note = misc_feature - Modified Amino Acid: AIB
  SITE 7: note = misc_feature - Modified Amino Acid: AEF
  SITE 8: note = misc_feature - Modified Amino Acid: 2Nal
  SITE 9: note = misc_feature - Modified Amino Acid: THP
  SITE 12: note = misc_feature - Modified Amino Acid: 3Pya
  SITE 13: note = misc_feature - Modified Amino Acid: MeGly
  SITE 13: note = Mod_Res - N-terminal is: am
  REGION 1..6: note = Disulfid - Cyclic bond: A to AIB
ANTWQXXXXENXG

SEQ ID NO: 452 - protein, 13 aa, synthetic construct
  REGION 1..13: note = Modified peptide: 1828
  SITE 1: note = Mod_Res - C-terminal is: ac
  SITE 1: note = misc_feature - Modified Amino Acid: Pen
  SITE 4: note = misc_feature - Modified Amino Acid: 7MeW
  SITE 5: note = misc_feature - Modified Amino Acid: KAc
  SITE 6: note = misc_feature - Modified Amino Acid: Pen
  SITE 7: note = misc_feature - Modified Amino Acid: AEF
  SITE 8: note = misc_feature - Modified Amino Acid: 2Quin
  SITE 9: note = misc_feature - Modified Amino Acid: THP
  SITE 12: note = misc_feature - Modified Amino Acid: 3Pya
  SITE 13: note = misc_feature - Modified Amino Acid: MeGly
  SITE 13: note = Mod_Res - N-terminal is: am
  REGION 1..6: note = Disulfid - Cyclic bond: Pen to Pen
XNTWKXXXXENXG

SEQ ID NO: 453 - protein, 14 aa, synthetic construct
  REGION 1..14: note = Modified peptide: 1850dR
  SITE 1: note = Mod_Res - C-terminal is: ac
  SITE 1: note = misc_feature - Modified Amino Acid: dR
  SITE 5: note = misc_feature - Modified Amino Acid: 7MeW
  SITE 6: note = misc_feature - Modified Amino Acid: KAc
  SITE 7: note = misc_feature - Modified Amino Acid: AIB
  SITE 8: note = misc_feature - Modified Amino Acid: AEF
  SITE 9: note = misc_feature - Modified Amino Acid: 2Nal
  SITE 10: note = misc_feature - Modified Amino Acid: THP
  SITE 13: note = misc_feature - Modified Amino Acid: 3Pya
  SITE 14: note = misc_feature - Modified Amino Acid: MeGly
  SITE 14: note = Mod_Res - N-terminal is: am
  REGION 2..7: note = Disulfid - Cyclic bond: A to AIB
  REGION 2..7: note = Disulfid - Cyclic bond: E to AEF
RAETWKXXXXENXG

SEQ ID NO: 454 - protein, 14 aa, synthetic construct
  REGION 1..14: note = Modified peptide: 1874dR
  SITE 1: note = Mod_Res - C-terminal is: ac
  SITE 1: note = misc_feature - Modified Amino Acid: dR
  SITE 2: note = misc_feature - Modified Amino Acid: Pen
  SITE 5: note = misc_feature - Modified Amino Acid: 7MeW
  SITE 6: note = misc_feature - Modified Amino Acid: KAc
  SITE 7: note = misc_feature - Modified Amino Acid: Pen
  SITE 8: note = misc_feature - Modified Amino Acid: AEF
  SITE 9: note = misc_feature - Modified Amino Acid: 2Nal
  SITE 10: note = misc_feature - Modified Amino Acid: THP
  SITE 13: note = misc_feature - Modified Amino Acid: 3Pya
  SITE 14: note = misc_feature - Modified Amino Acid: MeGly
  SITE 14: note = Mod_Res - N-terminal is: COOH
  REGION 2..7: note = Disulfid - Cyclic bond: Pen to Pen
RXNTWKXXXXENXG

SEQ ID NO: 455 - protein, 13 aa, synthetic construct
  REGION 1..13: note = Modified peptide: 1920
  SITE 1: note = Mod_Res - C-terminal is: ac
  SITE 1: note = misc_feature - Modified Amino Acid: Abu
  SITE 4: note = misc_feature - Modified Amino Acid: 7MeW
  SITE 5: note = misc_feature - Modified Amino Acid: KAc
  SITE 7: note = misc_feature - Modified Amino Acid: AEF
  SITE 8: note = misc_feature - Modified Amino Acid: 2Nal
  SITE 9: note = misc_feature - Modified Amino Acid: THP
  SITE 12: note = misc_feature - Modified Amino Acid: 3Pya
  SITE 13: note = misc_feature - Modified Amino Acid: MeGly
  SITE 13: note = Mod_Res - N-terminal is: am
  REGION 1..6: note = Disulfid - Cyclic bond: Abu to C
XNTWKCXXXENXG

SEQ ID NO: 456 - protein, 13 aa, synthetic construct
  REGION 1..13: note = Modified peptide: 1922
  SITE 1: note = Mod_Res - C-terminal is: ac
  SITE 1: note = misc_feature - Modified Amino Acid: Abu
  SITE 4: note = misc_feature - Modified Amino Acid: 7MeW
  SITE 5: note = misc_feature - Modified Amino Acid: KAc
  SITE 6: note = misc_feature - Modified Amino Acid: Pen
  SITE 7: note = misc_feature - Modified Amino Acid: AEF
  SITE 8: note = misc_feature - Modified Amino Acid: 2Nal
  SITE 9: note = misc_feature - Modified Amino Acid: THP
  SITE 12: note = misc_feature - Modified Amino Acid: 3Pya
  SITE 13: note = misc_feature - Modified Amino Acid: MeGly
  SITE 13: note = Mod_Res - N-terminal is: am
  REGION 1..6: note = Disulfid - Cyclic bond: Abu to Pen
XNTWKXXXXENXG

SEQ ID NO: 457 - protein, 14 aa, synthetic construct
  REGION 1..14: note = Modified peptide: 1923dR
  SITE 1: note = Mod_Res - C-terminal is: ac
  SITE 1: note = misc_feature - Modified Amino Acid: dR
  SITE 2: note = misc_feature - Modified Amino Acid: Abu
  SITE 5: note = misc_feature - Modified Amino Acid: 7MeW
  SITE 6: note = misc_feature - Modified Amino Acid: KAc
  SITE 8: note = misc_feature - Modified Amino Acid: AEF
  SITE 9: note = misc_feature - Modified Amino Acid: 2Nal
  SITE 10: note = misc_feature - Modified Amino Acid: THP
  SITE 13: note = misc_feature - Modified Amino Acid: 3Pya
  SITE 14: note = misc_feature - Modified Amino Acid: MeGly
  SITE 14: note = Mod_Res - N-terminal is: am
  REGION 2..7: note = Disulfid - Cyclic bond: Abu to C
RXNTWKCXXXENXG

SEQ ID NO: 458 - protein, 14 aa, synthetic construct
  REGION 1..14: note = Modified peptide: 1974dR
  SITE 1: note = Mod_Res - C-terminal is: ac
  SITE 1: note = misc_feature - Modified Amino Acid: dR
  SITE 2: note = misc_feature - Modified Amino Acid: Abu
  SITE 5: note = misc_feature - Modified Amino Acid: 7MeW
  SITE 6: note = misc_feature - Modified Amino Acid: KAc
  SITE 7: note = misc_feature - Modified Amino Acid: Pen
  SITE 8: note = misc_feature - Modified Amino Acid: AEF
  SITE 9: note = misc_feature - Modified Amino Acid: 2Nal
  SITE 10: note = misc_feature - Modified Amino Acid: THP
  SITE 13: note = misc_feature - Modified Amino Acid: 3Pya
  SITE 14: note = misc_feature - Modified Amino Acid: MeGly
  SITE 14: note = Mod_Res - N-terminal is: am
  REGION 2..7: note = Disulfid - Cyclic bond: Abu to Pen
RXNTWKXXXXENXG

SEQ ID NO: 459 - protein, 14 aa, synthetic construct
  REGION 1..14: note = Modified peptide: 2011dR
  SITE 1: note = Mod_Res - C-terminal is: ac
  SITE 1: note = misc_feature - Modified Amino Acid: dR
  SITE 2: note = misc_feature - Modified Amino Acid: 4RAminoPro
  SITE 5: note = misc_feature - Modified Amino Acid: 7MeW
  SITE 6: note = misc_feature - Modified Amino Acid: KAc
  SITE 8: note = misc_feature - Modified Amino Acid: AEF
  SITE 9: note = misc_feature - Modified Amino Acid: 2Nal
  SITE 10: note = misc_feature - Modified Amino Acid: THP
  SITE 13: note = misc_feature - Modified Amino Acid: 3Pya
  SITE 14: note = misc_feature - Modified Amino Acid: MeGly
  SITE 14: note = Mod_Res - N-terminal is: am
  REGION 2..7: note = Disulfid - Cyclic bond: 4RAminoPro to D
RXNTWKDXXXENXG

SEQ ID NO: 460 - protein, 14 aa, synthetic construct
  REGION 1..14: note = Modified peptide: 2022dR
  SITE 1: note = Mod_Res - C-terminal is: ac
  SITE 1: note = misc_feature - Modified Amino Acid: dR
  SITE 2: note = misc_feature - Modified Amino Acid: 4SAminoPro
  SITE 5: note = misc_feature - Modified Amino Acid: 7MeW
  SITE 6: note = misc_feature - Modified Amino Acid: KAc
  SITE 8: note = misc_feature - Modified Amino Acid: AEF
  SITE 9: note = misc_feature - Modified Amino Acid: 2Nal
  SITE 10: note = misc_feature - Modified Amino Acid: THP
  SITE 13: note = misc_feature - Modified Amino Acid: 3Pya
  SITE 14: note = misc_feature - Modified Amino Acid: MeGly
  SITE 14: note = Mod_Res - N-terminal is: am
  REGION 2..7: note = Disulfid - Cyclic bond: 4SAminoPro to D
RXNTWKDXXXENXG

SEQ ID NO: 461 - protein, 13 aa, synthetic construct
  REGION 1..13: note = Modified peptide: 2056dR
  SITE 1: note = Mod_Res - C-terminal is: ac
  SITE 1: note = misc_feature - Modified Amino Acid: dR
  SITE 2: note = misc_feature - Modified Amino Acid: Pen
  SITE 5: note = misc_feature - Modified Amino Acid: 7MeW
  SITE 6: note = misc_feature - Modified Amino Acid: KAc
  SITE 7: note = misc_feature - Modified Amino Acid: Pen
  SITE 8: note = misc_feature - Modified Amino Acid: AEF
  SITE 9: note = misc_feature - Modified Amino Acid: 2Nal
  SITE 10: note = misc_feature - Modified Amino Acid: aMeK
  SITE 13: note = Mod_Res - N-terminal is: am
  REGION 2..7: note = Disulfid - Cyclic bond: Pen to Pen
RXNTWKXXXKENH

SEQ ID NO: 462 - protein, 12 aa, synthetic construct
  REGION 1..12: note = Modified peptide: 2058
  SITE 1: note = Mod_Res - C-terminal is: ac
  SITE 1: note = misc_feature - Modified Amino Acid: Pen
  SITE 4: note = misc_feature - Modified Amino Acid: 7MeW
  SITE 5: note = misc_feature - Modified Amino Acid: KAc
  SITE 6: note = misc_feature - Modified Amino Acid: Pen
  SITE 7: note = misc_feature - Modified Amino Acid: AEF
  SITE 8: note = misc_feature - Modified Amino Acid: 2Nal
  SITE 9: note = misc_feature - Modified Amino Acid: aMeK
  SITE 10: note = misc_feature - Modified Amino Acid: KAc
  SITE 12: note = Mod_Res - N-terminal is: am
  REGION 1..6: note = Disulfid - Cyclic bond: Pen to Pen
XNTWKXXXKKNH

SEQ ID NO: 463 - protein, 13 aa, synthetic construct
  REGION 1..13: note = Modified peptide: 2104
  SITE 1: note = Mod_Res - C-terminal is: ac
  SITE 1: note = misc_feature - Modified Amino Acid: Pen
  SITE 4: note = misc_feature - Modified Amino Acid: 7(3NAcPh)W
  SITE 5: note = misc_feature - Modified Amino Acid: KAc
  SITE 6: note = misc_feature - Modified Amino Acid: Pen
  SITE 7: note = misc_feature - Modified Amino Acid: AEF
  SITE 8: note = misc_feature - Modified Amino Acid: 2Nal
  SITE 9: note = misc_feature - Modified Amino Acid: THP
  SITE 10: note = misc_feature - Modified Amino Acid: KAc
  SITE 12: note = misc_feature - Modified Amino Acid: 3Pya
  SITE 13: note = misc_feature - Modified Amino Acid: MeGly
  SITE 13: note = Mod_Res - N-terminal is: am
  REGION 1..6: note = Disulfid - Cyclic bond: Pen to Pen
XNTXKXXXXKNXG

SEQ ID NO: 464 - protein, 13 aa, synthetic construct
  REGION 1..13: note = Modified peptide: 2146
  SITE 1: note = Mod_Res - C-terminal is: ac
  SITE 1: note = misc_feature - Modified Amino Acid: Pen(pXyl)
  SITE 4: note = misc_feature - Modified Amino Acid: 7MeW
  SITE 5: note = misc_feature - Modified Amino Acid: KAc
  SITE 6: note = misc_feature - Modified Amino Acid: Pen
  SITE 7: note = misc_feature - Modified Amino Acid: AEF
  SITE 8: note = misc_feature - Modified Amino Acid: 2Nal
  SITE 9: note = misc_feature - Modified Amino Acid: THP
  SITE 12: note = misc_feature - Modified Amino Acid: 3Pya
  SITE 13: note = misc_feature - Modified Amino Acid: MeGly
  SITE 13: note = Mod_Res - N-terminal is: am
  REGION 1..6: note = Disulfid - Cyclic bond: Pen(pXyl) to Pen
XNTWKXXXXENXG

SEQ ID NO: 465 - protein, 13 aa, synthetic construct
  REGION 1..13: note = Modified peptide: 2147
  SITE 1: note = Mod_Res - C-terminal is: ac
  SITE 1: note = misc_feature - Modified Amino Acid: Pen(oXyl)
  SITE 4: note = misc_feature - Modified Amino Acid: 7MeW
  SITE 5: note = misc_feature - Modified Amino Acid: KAc
  SITE 6: note = misc_feature - Modified Amino Acid: Pen
  SITE 7: note = misc_feature - Modified Amino Acid: AEF
  SITE 8: note = misc_feature - Modified Amino Acid: 2Nal
  SITE 9: note = misc_feature - Modified Amino Acid: THP
  SITE 12: note = misc_feature - Modified Amino Acid: 3Pya
  SITE 13: note = misc_feature - Modified Amino Acid: MeGly
  SITE 13: note = Mod_Res - N-terminal is: am
  REGION 1..6: note = Disulfid - Cyclic bond: Pen(oXyl) to Pen
XNTWKXXXXENXG

SEQ ID NO: 466 - protein, 13 aa, synthetic construct
  REGION 1..13: note = Modified peptide: 2163
  SITE 1: note = Mod_Res - C-terminal is: ac
  SITE 1: note = misc_feature - Modified Amino Acid: Pen(mXyl)
  SITE 4: note = misc_feature - Modified Amino Acid: 7MeW
  SITE 5: note = misc_feature - Modified Amino Acid: KAc
  SITE 6: note = misc_feature - Modified Amino Acid: Pen
  SITE 7: note = misc_feature - Modified Amino Acid: AEF
  SITE 8: note = misc_feature - Modified Amino Acid: 2Nal
  SITE 9: note = misc_feature - Modified Amino Acid: THP
  SITE 12: note = misc_feature - Modified Amino Acid: 3Pya
  SITE 13: note = misc_feature - Modified Amino Acid: MeGly
  SITE 13: note = Mod_Res - N-terminal is: am
  REGION 1..6: note = Disulfid - Cyclic bond: Pen(mXyl) to Pen
XNTWKXXXXENXG

SEQ ID NO: 467 - protein, 14 aa, synthetic construct
  REGION 1..14: note = Modified peptide: 2200dR
  SITE 1: note = Mod_Res - C-terminal is: ac
  SITE 1: note = misc_feature - Modified Amino Acid: dR
  SITE 2: note = misc_feature - Modified Amino Acid: Pen
  SITE 5: note = misc_feature - Modified Amino Acid: 7(3NAcPh)W
  SITE 6: note = misc_feature - Modified Amino Acid: KAc
  SITE 7: note = misc_feature - Modified Amino Acid: Pen
  SITE 8: note = misc_feature - Modified Amino Acid: AEF
  SITE 9: note = misc_feature - Modified Amino Acid: 2Nal
  SITE 10: note = misc_feature - Modified Amino Acid: THP
  SITE 13: note = misc_feature - Modified Amino Acid: 3Pya
  SITE 14: note = misc_feature - Modified Amino Acid: MeGly
  SITE 14: note = Mod_Res - N-terminal is: am
  REGION 2..7: note = Disulfid - Cyclic bond: Pen to Pen
RXNTXKXXXXENXG

SEQ ID NO: 468 - protein, 13 aa, synthetic construct
  REGION 1..13: note = Modified peptide: 2216
  SITE 1: note = Mod_Res - C-terminal is: ac
  SITE 1: note = misc_feature - Modified Amino Acid: dPen
  SITE 2: note = misc_feature - Modified Amino Acid: dN
  SITE 3: note = misc_feature - Modified Amino Acid: dT
  SITE 4: note = misc_feature - Modified Amino Acid: D7MeW
  SITE 5: note = misc_feature - Modified Amino Acid: dKAc
  SITE 6: note = misc_feature - Modified Amino Acid: dPen
  SITE 7: note = misc_feature - Modified Amino Acid: dY
  SITE 8: note = misc_feature - Modified Amino Acid: d2nal
  SITE 9: note = misc_feature - Modified Amino Acid: THP
  SITE 10: note = misc_feature - Modified Amino Acid: dE
  SITE 11: note = misc_feature - Modified Amino Acid: dN
  SITE 12: note = misc_feature - Modified Amino Acid: 3pya
  SITE 13: note = misc_feature - Modified Amino Acid: MeGly
  SITE 13: note = Mod_Res - N-terminal is: am
  REGION 1..6: note = Disulfid - Cyclic bond: dPen to dPen
XNTWXXYXXENXG

SEQ ID NO: 469 - protein, 12 aa, synthetic construct
  REGION 1..12: note = Modified peptide: 2218
  SITE 1: note = Mod_Res - C-terminal is: ac
  SITE 12: note = Mod_Res - N-terminal is: am
ANTWQAYWAENH

SEQ ID NO: 470 - protein, 14 aa, synthetic construct
  REGION 1..14: note = Modified peptide: 2247dR
  SITE 1: note = Mod_Res - C-terminal is: ac
  SITE 1: note = misc_feature - Modified Amino Acid: dR
  SITE 2: note = misc_feature - Modified Amino Acid: Pen
  SITE 5: note = misc_feature - Modified Amino Acid: 7(3NAcPh)W
  SITE 6: note = misc_feature - Modified Amino Acid: KAc
  SITE 7: note = misc_feature - Modified Amino Acid: Pen
  SITE 8: note = misc_feature - Modified Amino Acid: AEF
  SITE 10: note = misc_feature - Modified Amino Acid: THP
  SITE 13: note = misc_feature - Modified Amino Acid: 3Pya
  SITE 14: note = misc_feature - Modified Amino Acid: MeGly
  SITE 14: note = Mod_Res - N-terminal is: am
  REGION 2..7: note = Disulfid - Cyclic bond: Pen to Pen
RXNTXKXXWXENXG

SEQ ID NO: 471 - protein, 14 aa, synthetic construct
  REGION 1..14: note = Modified peptide: 2249dR
  SITE 1: note = Mod_Res - C-terminal is: ac
  SITE 1: note = misc_feature - Modified Amino Acid: dR
  SITE 2: note = misc_feature - Modified Amino Acid: Pen
  SITE 5: note = misc_feature - Modified Amino Acid: 7(3NAcPh)W
  SITE 6: note = misc_feature - Modified Amino Acid: KAc
  SITE 7: note = misc_feature - Modified Amino Acid: Pen
  SITE 10: note = misc_feature - Modified Amino Acid: THP
  SITE 13: note = misc_feature - Modified Amino Acid: 3Pya
  SITE 14: note = misc_feature - Modified Amino Acid: MeGly
  SITE 14: note = Mod_Res - N-terminal is: am
  REGION 2..7: note = Disulfid - Cyclic bond: Pen to Pen
RXNTXKXYWXENXG

SEQ ID NO: 472 - protein, 12 aa, synthetic construct
  REGION 1..12: note = Modified peptide: 2255
  SITE 1: note = Mod_Res - C-terminal is: ac
  SITE 12: note = Mod_Res - N-terminal is: am
  REGION 1..6: note = Disulfid - Cyclic bond: C to C
CNTWQCYWAENH

SEQ ID NO: 473 - protein, 14 aa, synthetic construct
  REGION 1..14: note = Modified peptide: 2284dR
  SITE 1: note = Mod_Res - C-terminal is: ac
  SITE 1: note = misc_feature - Modified Amino Acid: dR
  SITE 2: note = misc_feature - Modified Amino Acid: Pen
  SITE 5: note = misc_feature - Modified Amino Acid: 7(3NAcPh)W
  SITE 6: note = misc_feature - Modified Amino Acid: KAc
  SITE 7: note = misc_feature - Modified Amino Acid: Pen
  SITE 8: note = misc_feature - Modified Amino Acid: AEF
  SITE 9: note = misc_feature - Modified Amino Acid: 2Nal
  SITE 10: note = misc_feature - Modified Amino Acid: THP
  SITE 14: note = misc_feature - Modified Amino Acid: MeGly
  SITE 14: note = Mod_Res - N-terminal is: am
  REGION 2..7: note = Disulfid - Cyclic bond: Pen to Pen
RXNTXKXXXXENHG

SEQ ID NO: 474 - protein, 13 aa, synthetic construct
  REGION 1..13: note = Modified peptide: 2286dR
  SITE 1: note = Mod_Res - C-terminal is: ac
  SITE 1: note = misc_feature - Modified Amino Acid: dR
  SITE 2: note = misc_feature - Modified Amino Acid: Pen
  SITE 5: note = misc_feature - Modified Amino Acid: 7MeW
  SITE 6: note = misc_feature - Modified Amino Acid: KAc
  SITE 7: note = misc_feature - Modified Amino Acid: Pen
  SITE 8: note = misc_feature - Modified Amino Acid: AEF
  SITE 9: note = misc_feature - Modified Amino Acid: 2Nal
  SITE 10: note = misc_feature - Modified Amino Acid: Acpx
  SITE 13: note = Mod_Res - N-terminal is: am
  REGION 2..7: note = Disulfid - Cyclic bond: Pen to Pen
RXNTWKXXXXENH

SEQ ID NO: 475 - protein, 13 aa, synthetic construct
  REGION 1..13: note = Modified peptide: 2287
  SITE 1: note = Mod_Res - C-terminal is: ac
  SITE 1: note = misc_feature - Modified Amino Acid: Pen
  SITE 4: note = misc_feature - Modified Amino Acid: 7MeW
  SITE 5: note = misc_feature - Modified Amino Acid: KAc
  SITE 6: note = misc_feature - Modified Amino Acid: Pen
  SITE 7: note = misc_feature - Modified Amino Acid: AEF
  SITE 8: note = misc_feature - Modified Amino Acid: 2Nal
  SITE 9: note = misc_feature - Modified Amino Acid: THP
  SITE 13: note = misc_feature - Modified Amino Acid: MeGly
  SITE 13: note = Mod_Res - N-terminal is: am
  REGION 1..6: note = Disulfid - Cyclic bond: Pen to Pen
XNTWKXXXXENFG

SEQ ID NO: 476 - protein, 14 aa, synthetic construct
  REGION 1..14: note = Modified peptide: 2305dR
  SITE 1: note = Mod_Res - C-terminal is: ac
  SITE 1: note = misc_feature - Modified Amino Acid: dR
  SITE 2: note = misc_feature - Modified Amino Acid: Pen
  SITE 5: note = misc_feature - Modified Amino Acid: 7(3NAcPh)W
  SITE 6: note = misc_feature - Modified Amino Acid: KAc
  SITE 7: note = misc_feature - Modified Amino Acid: Pen
  SITE 8: note = misc_feature - Modified Amino Acid: AEF
  SITE 9: note = misc_feature - Modified Amino Acid: 2Nal
  SITE 10: note = misc_feature - Modified Amino Acid: THP
  SITE 13: note = misc_feature - Modified Amino Acid: 5MePyridinAla
  SITE 14: note = misc_feature - Modified Amino Acid: MeGly
  SITE 14: note = Mod_Res - N-terminal is: am
  REGION 2..7: note = Disulfid - Cyclic bond: Pen to Pen
RXNTXKXXXXENXG

SEQ ID NO: 477 - protein, 13 aa, synthetic construct
  REGION 1..13: note = Modified peptide: 2148
  SITE 1: note = Mod_Res - C-terminal is: ac
  SITE 1: note = misc_feature - Modified Amino Acid: Pen
  SITE 4: note = misc_feature - Modified Amino Acid: 7MeW
  SITE 5: note = misc_feature - Modified Amino Acid: KAc
  SITE 6: note = misc_feature - Modified Amino Acid: Pen
  SITE 7: note = misc_feature - Modified Amino Acid: AEF(G)
  SITE 8: note = misc_feature - Modified Amino Acid: 2Nal
  SITE 9: note = misc_feature - Modified Amino Acid: THP
  SITE 12: note = misc_feature - Modified Amino Acid: 3Pya
  SITE 13: note = misc_feature - Modified Amino Acid: MeGly
  SITE 13: note = Mod_Res - N-terminal is: am
  REGION 1..6: note = Disulfid - Cyclic bond: Pen to Pen
XNTWKXXXXENXG

SEQ ID NO: 478 - protein, 14 aa, synthetic construct
  REGION 1..14: note = Modified peptide: 2176
  SITE 1: note = Mod_Res - C-terminal is: ac
  SITE 1: note = misc_feature - Modified Amino Acid: dR
  SITE 2: note = misc_feature - Modified Amino Acid: Abu
  SITE 6: note = misc_feature - Modified Amino Acid: KAc
  SITE 7: note = misc_feature - Modified Amino Acid: aMeC
  SITE 8: note = misc_feature - Modified Amino Acid: AEF
  SITE 9: note = misc_feature - Modified Amino Acid: 2Nal
  SITE 10: note = misc_feature - Modified Amino Acid: THP
  SITE 13: note = misc_feature - Modified Amino Acid: 3Pya
  SITE 14: note = misc_feature - Modified Amino Acid: MeGly
  SITE 14: note = Mod_Res - N-terminal is: am
  REGION 2..7: note = Disulfid - Cyclic bond: Abu to C
RXNTWKCXXXENXG

What is claimed is:

1. A peptide inhibitor of an interleukin-23 receptor of Formula (I), comprising an amino acid sequence:
R1-X3-X4-X5-X6-X7-X8-X9-X10-X11-X12-X13-X14-X15-X16-R2
wherein:
R1 is hydrogen, CH₃C(O)—, EtC(O)—, MeSO2, AzCO, BHCO, FPrpTriazoleMeCO, SMSBCO, Biotin, BiotinPEG2PEG2CO, DAGSuc;
X3 is dR, dK, PEG6, gEPEG6, R, K, or absent;
X4 is Pen, aMeC, hC, or C;
X5 is A, N, Q, N-MeAsn, L, Asn(4C13_2N15), I, K (PEG2PEG2Biotin);
X6 is T, MeThr, V, K, Dbu, Dpr, A;
X7 is W7Me, W, W(4F7Me), 7MeW, 7PhW, 7EtW, 7FW, 7ClW, 5BrW, 7(3NAcPh)W′
X8 is KAc, Q, NMeGln, A, Cit, dK(Ac), dQ, dNMeGln, dA, or dCit;
X9 is Pen, aMeC, hC, or C;
X10 is F4OMe, AEF, F, F4Me, F4Ad, Nal, AEF(Boc), 4PipPhe, AEF(Ac), Y, 4OMeF, 4AmF, D(Pip), Tzl(mPEG3), 3FTyr, Y(OTzl), Y(OTzl(mPEG3)), Tzl, Tzl(PEG3OH);
X11 is Nal, Quin_3, Coumarin(7OMe), 2Nal, 3Quin;
X12 is aMeK, THP, Spiral_Pip_Ac, Spiral_Pip, MeK, aMeLeu, aMeL, aMeK(Boc)
X13 is KAc, K, dK(Ac), or dK;
X14 is A, N, L, N-MeAsn, MeLeu, Asn(4C13_2N15), I;
X15 is 3Pya, bAla, Thiozolidine, H, dL, N, A, F, aMePhe, Aib, dK, h, 3MeH, 1MeH, tetraFPhe, bMePhe(SR), 5PyrimidAla, v, dR, homoF, Y, y, F(CF3), Y(CHF2), THP, or absent;
X16 is MeGly, dMeGly, dL, MeLeu, dMeLeu, N-MeNle, dN-MeNle, y, paf, maf, d3Pya, bAla, dbAla, P, dP, N(3AmBenzyl)Gly, N(4AmBenzyl)Gly, 4(R)HydroxyPro, 4(S)AminoPro, 5(R)diMePro, or absent
R2 is —OH, —NH₂, —HN(C₁-C₄ alkyl), —N(C₁-C₄ alkyl)₂, MeNH, CONHMe; and
wherein the inhibitor of an interleukin-23 receptor is cyclized by a disulfide bond between penicillamine, cysteine, homocysteine, or alpha methylcysteine residues at positions X4 and X9.

2. A peptide inhibitor of an interleukin-23 receptor of Formula (II), comprising an amino acid sequence:
R1-X3-Abu-X5-T-X7-X8-X9-AEF-X11-X12-X13-X14-X15-X16-X17-R2 (II)
wherein:
R1 is hydrogen, or CH₃C(O)—;
X3 is dR, R, or absent;
X4 is Abu;
X5 is Q, N, or T;
X6 is T;
X7 is W or 7MeW;
X8 is Q, K, KAc, dQ, dK, or dK(Ac);
X9 is Pen, C, hC, or aMeC;
X10 is AEF;
X11 is 2Nal, or Nal;
X12 is THP, Acvc, or Achx;
X13 is E, KAc, aMeE, Q, AIB, Achx, aMedE, dE, dK(Ac), or dQ;
X14 is N or S;
X15 is H, bAla, N, 3Pya, F, aMeF, aMeW, 1Nal, 4AmPhe, 2Nal, aMeFPhe, aMePhe, 3,4diFPhe, DY02, 5FW, or absent;
X16 is MeGly, AIB, or absent;
X17 is aMeK or absent;
R2 is —OH, —NH₂, —HN(C₁-C₄ alkyl), —N(C₁-C₄ alkyl)₂; and
wherein the inhibitor of an interleukin-23 receptor is cyclized by a thioether bond between the Abu residue at X4 and a cysteine, homocysteine, or alpha methylcysteine residue at X9.

3. A peptide inhibitor of an interleukin-23 receptor of Formula (III), comprising an amino acid sequence:
R1-X3-X4-X5-X6-X7-X8-X9-X10-X11-X12-X13-X14-X15-X16-R2 (III)
wherein:
R1 is hydrogen, CH₃C(O)—, FPrpTriazoleMeCO, NH₂, EtCO, AzCO, or BHCO;
X3 is dR, R, K, or dK;
X4 is Pen, Abu, AIB, aMeC, C, hC, Ala, 4RAminoPro, or 4SAminoPro;
X5 is N, D, or E;
X6 is T, Hyp, or 3OHPro;
X7 is 7MeW, W, 3Pya, A, 7PyrW, or 7(3NAcPh)W;
X8 is KAc, or dKAc;
X9 is Pen, C, S5H, AIB, D, E, hC, aMeC;
X10 is AEF, AEF(EtCO), AEF(BH), AEF(Ac), bMeAEF(2S3R*), bMeAEF(2S3S*), Y, or A;
X11 is 2Nal, A, Nal, or W;
X12 is THP;
X13 is E, KAc, S5H, dE, dKAc, or R5H;
X14 is N, S, 3Pya;
X15 is 3Pya, H, bAla, v, dR, hF, PAF, F, THP, 1, 4Pya, oAMPhe, 3MeH, D3Pya, N, 5MePyridinAla, 5AmPyridinAla, 3QuinolAla, 6OH3Pya, A
X16 is MeGly;
R2 is —NH₂—HN(C₁-C₄ alkyl), —N(C₁-C₄ alkyl) 2 or —OH; and
wherein the inhibitor of an interleukin-23 receptor is cyclized by a disulfide bond between penicillamine, cysteine, homocysteine, or alpha methylcysteine residues at positions X4 and X9; or
wherein the inhibitor of an interleukin-23 receptor is cyclized by a thioether bond between the Abu residue at X4 and a cysteine, homocysteine, or alpha methylcysteine residue at X9;
or
wherein when X4 is 4RAminoPro or 4SAminoPro and X9 is E or D, the inhibitor of an interleukin-23 receptor is cyclized by an amide bond between X4 and X9;
or
wherein when X5 is D or E, and X10 comprises an AEF residue, the inhibitor of an interleukin-23 receptor is cyclized by an amide bond between X5 and X10;
or
wherein when X9 and X13 comprise S5H residues the inhibitor of an interleukin-23 receptor is cyclized by an aliphatic linkage between X9 and X13.

4. A peptide inhibitor of an interleukin-23 receptor of Formula IV, comprising an amino acid sequence:
R1-X3-X4-X5-X6-X7-X8-X9-X10-X11-X12-X13-X14-X15-X16-R2 (IV)
wherein:
R1 is hydrogen, CH₃C(O)—, Ac_Morph, or MorphCO;
X3 is K(AcMorp), Kmorp, dK(AcMorp), or absent;
X4 is Pen, C, hC, or aMeC;
X5 is L, N, or nLeu;
X6 is T or L;
X7 is W or 7MeW;
X8 is KAc, K(AcMorph), K(IsoButyl_Ac), K(Butyl_Ac), K(Benzyl_Ac), KMorph, K, dKAc, dK(AcMorph), dK(IsoButyl_Ac), dK(Butyl_Ac), dK(Benzyl_Ac), dKMorph, or dK;
X9 is Pen, C, hC, or aMeC;
X10 is F4OMe, F, AEF, F4Ad, L, F4CN, or 4OMeF;
X11 is 2Nal or Nal;
X12 is L, THP, Spiral_Pip, aMeK, or aMeL;
X13 is L, dL, or nL (i.e., norleucine);
X14 is N or L;
X15 is 3Pya or absent;
X16 is MeGly or absent;
R2 is NH (2-(pyridin3-1)ethyl), —NH₂, —HN(C₁-C₄ alkyl), —N(C₁-C₄ alkyl)₂, or —OH; and
wherein the inhibitor of an interleukin-23 receptor is cyclized by a disulfide bond between penicillamine, cysteine, homocysteine, or alpha methylcysteine residues at positions X4 and X9.

5. A peptide inhibitor of an interleukin-23 receptor of Formula V, comprising an amino acid sequence:
R1-X3-X4-X5-X6-X7-X8-X9-X10-X11-THP-X13-X14-X15-R2 (V)
wherein:
R1 is hydrogen, or CH₃C(O), Propionic_acid, EtCO, PentCO, AzCO, MeSO2, NH₂, BHCO, FPrpTriazoleMeCO, (SulfoCy3), (SulfoCy3dPEG2), (SulfoCy3dPEG3), or SMSBCO;
X3 is dR, R, or absent;
X4 is Abu, Pen, C, hC, aMeC, aG, or Dpr;
X5 is Q or N;
X6 is T;
X7 is W, W7Me, 7MeW, bMeW (2S3R), bMeW (2S3S), 7FW, 7ClW, 5BrW, or 5MeW;
X8 is Q, K, KAc, Q, dK, or dKAc;
X9 is C, Pen, hC, aMeC, aG, E, or D;
X10 is AEF, F4OMe, F4Ad, Phe(4(2(Ac)aminoethoxy)), ac, LY02, AEF(Boc), 4PipPhe, AEF(BH), or AEF(SMSB);
X11 is 2Nal or Nal;
X12 is THP;
X13 is E, KAc, K, Q, aMeE, AIB, dE, dKAc, dK, dQ, aMedE, or Achx;
X14 is N;
X15 is H, bAla, N, F, aMePhe, aMeF, aMeW, 1Nal, 4AmPhe, 2Nal, aMeFPhe, 3,4diFPhe, DY02, 5FW, D(NBzl), D(NPh), D(NoAn), D(NPip), D(NPyr), D(NpAn), D(NmAn), D(N4Pyz), D(N5In), D(NPrAm), dH, D(NEtNH2), 3MeH, 1MeH, tetraFPhe, bMePhe(SR), 5PyrimidAla, 3OHPhe, 4PyridinAla, 3Pya, 4TriazolAla, bMePhe(2S3S), 2AmTyr, bMeH(2S3S*), or 5MeH;
R2 is —NH₂, —OH, —HN(C₁-C₄ alkyl), —N(C₁-C₄ alkyl)₂, or CONHMe and
wherein the inhibitor of an interleukin-23 receptor is cyclized by a disulfide bond between penicillamine, cysteine, homocysteine, or alpha methylcysteine residues at positions X4 and X9; or
wherein the inhibitor of an interleukin-23 receptor is cyclized by a thioether bond between the Abu residue at X4 and a cysteine, homocysteine, or alpha methylcysteine residue at X9;
or
wherein when X4 is Dpr and X9 is E or D, the inhibitor of an interleukin-23 receptor is cyclized by an amide bond between X4 and X9; or
wherein when X4 and X9 are aG, the inhibitor of an interleukin-23 receptor is cyclized by an aliphatic bond (generated from a Ring Closing Metathesis “RCM” reaction) between X4 and X9.

6. A peptide inhibitor of an interleukin-23 receptor of Formula VI, comprising an amino acid sequence:
R1-X4-X5-X6-X7-X8-X9-X10-X11-X12-X13-X14-X15-X16-R2 (VI)
wherein:
R1 is hydrogen, or CH₃C(O);
X4 is Pen, Abu, C, hC, dPen, dC, or aMeC;
X5 is L, N, Q, T, dN or absent;
X6 is T, L, dT, or absent;
X7 is W7Me, W(4F7Me), 7PhW, 7MeW, 7EtW, W, 7BrW, 7(2ClPh)W, 7(4CF3Ph)W, 7(3CF3TAZP)W, 7(4NAcPh)W, 7(3NAcPh)W, 7(40CF3Ph)W, 7(40MePh)W, 7(4Paz)W, 7(7Imzpy)W, 7(6(1)7dMeNDAZ))W, 7(3UrPh)W, 7(5(Ina7Pyr))W, 7(4(CpCNPh))W, 7(6(2MeNDAZ))W, BT, D7MeW;
X8 is KAc, Q, K(Gly), dKAc, dQ, or dK(Gly);
X9 is Pen, C, hC, aMeC, or dPen;
X10 is AEF, F4Ad, F4OMe, F4Me, Nal, F, Spiral_Pip, L, 4AmF, AEF(G), dY, or Y;
X11 is Nal, 3Quin, 2Nal, 2Quin, d2Nal, or W;
X12 is THP, aMeLeu, Acvc, aMeK, or Acpx, A;
X13 is E or dE;
X14 is N, L, or dN;
X15 is 3Pya, THP, N, H, dK, dL, dPaf, PAF, 3MeH, 3pya, or F;
X16 is MeGly, dK, K, or absent; and
R2 is —NH₂, —OH, —HN(C₁-C₄ alkyl), —N(C₁-C₄ alkyl)₂, or CONHMe; and
wherein the inhibitor of an interleukin-23 receptor is cyclized by a disulfide bond between a Pen, C, hC, dPen, dC, or aMeC at X4 and a Pen, C, hC, aMeC, or dPen residue at X9; or
wherein the inhibitor of an interleukin-23 receptor is cyclized by a thioether bond between the Abu residue at X4 and a Pen, C, hC, or aMeC residue at X9.

7. A compound, or a pharmaceutically acceptable salt thereof, having a structure of a compound as set forth in Table 1A, Table 1B, Table 1C, Table 1D, Table 1E, Table 1F, Table 1G, Table 1H, Table 1I, An inhibitor of an interleukin-23 receptor which is selected from compound 345, 469, 477 or 478 as shown below:

[chemical structure]

[chemical structure]

8. The peptide inhibitor of an interleukin-23 receptor of any of claims 1-8, wherein D amino acids are present or substituted for a corresponding L amino acid only at
(i) one or more of positions X3, X5, X6, X8 and X13, and optionally one of positions X1-X2, X4, X7, X9 to X12, X14-X18 present in the inhibitor; or
(ii) one or more of positions X3, X8 and X13, and optionally at one of positions X1-X2, X4-X7, X9 to X12, X14-X18 present in the inhibitor.

9. The peptide inhibitor of an interleukin-23 receptor of any of claims 1-8, wherein D amino acids are present or are substituted for a corresponding L amino acid only at
(i) X3, and optionally at one of positions X1-X2, X4-X18 present in the inhibitor; or
(ii) one of positions X3, and X8, and optionally one of positions X1-X2, X4-X7, X9-X18 present in the inhibitor.

10. The peptide inhibitor of an interleukin-23 receptor of any of claims 1-8, wherein the inhibitor comprises amino acids of the D-isomeric form, or is substituted with a D amino acid in place of the corresponding L amino acid, at one to six of positions X1 to X18 appearing in the inhibitor.

11. The peptide inhibitor of an interleukin-23 receptor of claim 11, wherein the inhibitor comprises amino acids of the D-isomeric form, or is substituted with a D amino acid in place of the corresponding L amino acid at one or two of positions X1 to X18 appearing in the inhibitor.

12. The peptide inhibitor of an interleukin-23 receptor of claim 11, wherein the inhibitor comprises amino acids of the D-isomeric form, or is substituted with a D amino acid in place of the corresponding L amino acid at three or four of positions X1 to X18 appearing in the inhibitor.

13. The peptide inhibitor of an interleukin-23 receptor of claim 11, wherein the inhibitor comprises amino acids of the D-isomeric form, or is substituted with a D amino acid in place of the corresponding L amino acid at five or six of positions X1 to X18 appearing in the inhibitor.

14. A pharmaceutical composition comprising:
(i) a peptide inhibitor of an interleukin-23 receptor or pharmaceutically acceptable salt, solvate, or form thereof according to any of claims 1 to 14, and
(ii) a pharmaceutically acceptable carrier, excipient, or diluent.

15. A pharmaceutical composition comprising:
(i) a peptide inhibitor of an interleukin-23 receptor or pharmaceutically acceptable salt, solvate, or form thereof according to claim 7, and
(ii) a pharmaceutically acceptable carrier, excipient, or diluent.

16. A pharmaceutical composition comprising:
(i) a peptide inhibitor of an interleukin-23 receptor or pharmaceutically acceptable salt, solvate, or form thereof according to claim 8, and
(ii) a pharmaceutically acceptable carrier, excipient, or diluent.

17. The use of a peptide inhibitor of an interleukin-23 receptor according to any of claims 1 to 14, or a pharmaceutical composition according to any of claims 15 to 17, for the preparation of a medicament for the treatment of an inflammatory, autoimmune inflammation diseases and/or related disorders.

18. The use according to claim 18, for the preparation of a medicament for the treatment of associated with inflammatory, autoimmune inflammation diseases and/or related disorders is selected from multiple sclerosis, asthma, rheumatoid arthritis, inflammation of the gut, inflammatory bowel diseases (IBDs), juvenile IBD, adolescent IBD, Crohn's disease, ulcerative colitis, Celiac disease (nontropical Sprue), microscopic colitis, collagenous colitis, eosinophilic gastroenteritis/esophagitis, colitis associated with radio- or chemo-therapy, colitis associated with disorders of innate immunity as in leukocyte adhesion deficiency-1, sarcoidosis, Systemic Lupus Erythematosus, ankylosing spondylitis (axial spondyloarthritis), psoriatic arthritis, psoriasis (e.g., plaque psoriasis, guttate psoriasis, inverse psoriasis, pustular psoriasis, Palmo-Plantar Pustulosis, psoriasis vulgaris, or erythrodermic psoriasis), atopic dermatitis, acne ectopica, enteropathy associated with seronegative arthropathies, chronic granulomatous disease, glycogen storage disease type 1b, Hermansky-Pudlak syndrome, Chediak-Higashi syndrome, Wiskott-Aldrich Syndrome, pouchitis, pouchitis resulting after proctocolectomy and ileoanal anastomosis, gastrointestinal cancer, pancreatitis, insulin-dependent diabetes mellitus, mastitis, cholecystitis, cholangitis, primary biliary cirrhosis, viral-associated enteropathy, pericholangitis, chronic bronchitis, chronic sinusitis, asthma, uveitis, or graft versus host disease.

19. The use according to claim 18 for the preparation of a medicament for the treatment of a disease or disorder which is selected from Inflammatory Bowel Disease (IBD), Ulcerative colitis (UC), Crohn's Disease (CD), psoriasis (PsO) or psoriatic arthritis (PsA).

20. A method for treating a disease or disorder associated with Interleukin 23 (IL-23)/Interleukin 23 Receptor (IL-23R), which comprises administering:
(i) an effective amount of a peptide inhibitor of an interleukin-23 receptor, or a pharmaceutically acceptable salt, solvate, or form thereof according to any of claims 1 to 14; or
(ii) a pharmaceutical composition according to any of claims 15 to 17, respectively to a patient in need thereof.

21. The method according to claim 21, wherein the disease or disorder is associated with inflammatory, autoimmune inflammation diseases and/or related disorders.

22. The method according to claim 22, wherein the disease or disorder associated with inflammatory, autoimmune inflammation diseases and/or related disorders is selected from multiple sclerosis, asthma, rheumatoid arthritis, inflammation of the gut, inflammatory bowel diseases (IBDs), juvenile IBD, adolescent IBD, Crohn's disease, ulcerative colitis, Celiac disease (nontropical Sprue), microscopic colitis, collagenous colitis, eosinophilic gastroenteritis/esophagitis, colitis associated with radio- or chemo-therapy, colitis associated with disorders of innate immunity as in leukocyte adhesion deficiency-1, sarcoidosis, Systemic Lupus Erythematosus, ankylosing spondylitis (axial spondyloarthritis), psoriatic arthritis, psoriasis (e.g., plaque psoriasis, guttate psoriasis, inverse psoriasis, pustular psoriasis, Palmo-Plantar Pustulosis, psoriasis vulgaris, or erythrodermic psoriasis), atopic dermatitis, acne ectopica, enteropathy associated with seronegative arthropathies, chronic granulomatous disease, glycogen storage disease type 1b, Hermansky-Pudlak syndrome, Chediak-Higashi syndrome, Wiskott-Aldrich Syndrome, pouchitis, pouchitis resulting after proctocolectomy and ileoanal anastomosis, gastrointestinal cancer, pancreatitis, insulin-dependent diabetes mellitus, mastitis, cholecystitis, cholangitis, primary biliary cirrhosis, viral-associated enteropathy, pericholangitis, chronic bronchitis, chronic sinusitis, asthma, uveitis, or graft versus host disease.

23. The method of claim 22, wherein the disease or disorder is associated with and autoimmune disease is selected from Ulcerative colitis (UC), Crohn's Disease (CD), psoriasis (PsO), or psoriatic arthritis (PsA).
